United States Patent Application Publication US 2022/0008368 A1 - sequence listing, part 7

SEQ ID NO: 2 - DNA, 58617616 bp, Homo sapiens (residues 13,026,139-15,197,161 of 58,617,616)
  modified_base (1)..(60000): a, c, t, g, unknown or other
  modified_base (24448981)..(24498980): a, c, t, g, unknown or other
  modified_base (24552653)..(24552752): a, c, t, g, unknown or other
  modified_base (24891257)..(24891356): a, c, t, g, unknown or other
  modified_base (24895791)..(24895890): a, c, t, g, unknown or other
  modified_base (24898314)..(24904771): a, c, t, g, unknown or other
  modified_base (24908590)..(24908689): a, c, t, g, unknown or other
  modified_base (27190875)..(27240874): a, c, t, g, unknown or other
  modified_base (58607617)..(58617616): a, c, t, g, unknown or other
ggagctgttttggctgggatttggctgtcagtatgaaagtaatttgatttcatagagagtgaaaacaaggacgagattccttgagctctttcccttctccttatttcagctaaagtggcaaggcctcaggatggatgcccacagccctggcactggggagcagagaggctttctcggggcacaggcatggcagggagcagcgttgctgtggaagaggtcttaaacaagcaaacaaacaaaccaaaaaaaaaaaaaactctgtaaaatctccttttccttttgtgttccaagtagttctgcttctcttcgcttttccagttttaccctgcattttgggtcagggtggtttagttctcctcctctgttccttttttcccttaccctttccctttttataatttctttccgcttttgttttcttacaaattgaaacagagatggctggttaatttttagcctccactcagctacgcccaatttactgccgcctttgaaacctaaacgggcggcactctgtgattaagcaaggcagaagtgtgtttacattatgcccaaccaacttgtaatgagagggctaccaaacctttctctctctctctctctctctgtgtgtgtgtgtgtgtgtgtgtgtttcctttccaccattccagtattttttccccttcattttccttcttcctctctttatgcgaatttgagagaatgtggcttaacttcaactctcgcaaaggttgtttctccgcgagtgtgtgtctctgtgtctttcttcctgttcattcacaaaaaagaaaagtgattcacaatggctgtggtcacccccttgcctgtttgggaagttgggaggaatgatataactggatccagaaataaaattcgggtttgggggtgctttcagcactgcgtcaggaatgtaatctagactagagtgagccctgagtttacatgttggagaactgtggagaggagaaggtggtattggaattcttgtcctgagaggttgctttggtaactggttagaagcaggggacaccactctcaccccccaagtctctacctacttctgtggatctttctaggcctgcatccggccctgtgtgaccatcgtgacccgtcatgcagaagggccaggtgccagtcattccccctcccttcagcttgaattttttcttttgtcttttttctttttggaaaacagactgagagggaaaaaaaagttatcccctcattctctgtctatacagcaagccagatttgggagggtgtgtgcctggtagtattggaggtgactggtggcttgcagaaggctcggagcctcgagcttaccagtgtggccatcagatactcctgcacaaggggattctgcaccttccaattttagaaccaggggctcgagagcatctaagatgaaaatcaacactcatcttcctctgagctggcttcctccaaccccgctctctgactggatccttgtagctgagttgtttccctggcctcttttattttaggccgaattcttgactgctgccagtgtggggctaaggtaggatgaaaagtatgtgaggaagcagaccgtttcctggccagaagaaaggccccaccatgcctccctgccagcttaagagatcattcgcccaggaatatgagtgaattcataccccattccatgtagccgaggccacttctctgggctggggctgaggccgagtctcctctacaaaagcagagtagggaactaagggtgtattttatatcattcaggccccagactccagataatttcagtgaaggtaggatttttctcactggaattgctttagtttgagtgtgccttcctgaagtgagttgaggcgagttggcgcagcccgggccaccagtgggctgcatcacttgttcctctttggagttgggttgggtggtcttgagatggcacagaccaggcatggcttgcttcctccttgagctggcaagaaataaaaacatttcttgctttgctagaaaatgtcttctgtggctgagccaccaaagagcatcgatctgtgggcaccactttctccatgcccatgcctgccaggcacactcagcagagctgccacttgctccttccttccaggatgataaactggggacaggggccgggatggcacaggctcagacaagagctgctttggactctgaaataagtgtttttccttttcttaagacagggctgaagagccagatctgggctgagctgggggtcctgggtttcatgacagtaacggtgatgtggtggtaaatgtgggggtgtggctttgctcccaggtgccattgtcacccatggccttcctgagcccttgttatgtcccagatgaagcttcaagagatgacatgttcgagagggaataaaggacgtgtgtttggcgttgaaactccactcccagaatactgggtccaaatacagaatactaggtccaaaaggctgccatgcggctggccttcctgctgggaaggagtctgtctgtgtgtctgtctgtgtttaggaagggaggttgaggcagggcagggtcagagagcactgccgtggggaggagggtatccatttcctggtgatatccttccattcaaagcgggtatcccagaacaggtggccagggacgggtgagctggggagggccaggagagagatctctgcttgtgtgagaaaggatggccgagctggcctagaaccgctgctagactatctccaaagtttctgcagcaccctgaaggtgaaccagtgccttcagaccttccctgacacctaagccttggtcctaggaaagaaaaaaaaaaatccaaagctaacaaaatacttgagcgaatggaactgtcagcgtcaccctgtcagatccctcctgtgcgcctgcagcggaatccccacgaagtccaggtatttgagtggtggctcttttctttatctaaactctttaatgatggagagcttcccacatagaaagaactcctgtgtacccaccactagtgccagcaatcgccagatcacggccaatctcaattcaaccatcctcccaactgcccacccatgctgagttatttagaagatccaggcattatagcttttcatctgtaaatgtttttgtgcacatctctaaagatacggactcttgaaaaaccaaaccacaataccactattatacccattaaaaattcagcatttttttttagtatcatcagatactggttaatgttcacatttccctaattatcacttaattttttgtttatagtttgtttgaatcaggatccagatggggtcagtcctgcattgcgatgggttgatcagtctcaaaagactcatcataatctctaggtagtccttctcctcttcctcttccttagtcttggtttcttttctggcagttgtcattgttgttgtcgttgaaggaaacaggttgtttgtcctgtggggtttcctcagctggactctgcaggctgcgctgccccgagtgattcagtgagtgtggtgctctgagagcagattcggcctcccctccctccctaccttcaggtcccgggacagctgagcttagccttacctgtcgcaggaaatgggttagcacctgaagatttgtctaagtgaactttttcacctgtggggttgccttctcaggtatgagagcttcttggtttcggcactctagtttagggtttggggctttgtagcaggcactagttttcaggtctgagggagggctgcccatccacgtccttccttggcggtggagggcattgttcagctgtgtccatactgccaagacggggctggtgccagcgaggttccccaagcctttgctggatgcccaacccgactgttggctctggggtgagtatgtgggagggtccacaggagcacccgccgctttctccaggtccacccccaccatggaccctgtgccgcctcatccattgcctcctttttcaaggcccagaaatgccactggtctgcgtctttgaggcagcgccatctggtgccagggctgacaaagatcgcagggccctggaactgacgcctaaaattagcaggatctacagattatcttttaacccaatgtagggtcccctttagaacatcccagaagaggtgtcactgtcattcaaaggtcagctttggttgtaaaattcttccattcttccatgtctagcttgtaggatggttccagggattaaaccagctaatatgtaaagataccggcacatagcaggacggcagctgctgtgattgaggacaattgttatgatttagggagcccaaggctgactctctgtcacctttacttgttggtcttttttttctcttaagggatgacccaggtgaaagctgattttcctgtaacaggacagcatttgaaataccaaaggcagctcttatgtctcccttccacccttctccccaggaagctgtctcctctccagcctgaatatcaccagtccctaatgcctcccacatttcacatggctcctagtgcccttgccattttggtaaccacctcctggaagccctctggtttgttttggtccctctgattcataaaatttctgaaactggagtgttcagaattgaacacagaaactccaagcatgatcagatcctagccagccatggtggctacataattttcagggccttccagctacatactgtgcagggctcagtgcaaaatgaaaatgtggggctccttgttcaaaatttttaggaattacagcacgacatcagttagagcatttaaccaagcgtggggggcacgcaagttgcacacccgtgaagctggccctggccacctttgttttggacattcgtgtctgttaatacaacttggggtgctgggtctgggtgatgtggaataatgatggggctcaggctggcctcagagcggggcatgaccccaaagaggagaacagaaatgcccagacccaatccttatgcttgggcttggtcttattctcagactcctttgaccacctgctcttgtcccttttgttcatagtgctgtccacccaaccagtcaagagctcccattgcctacaacatgcagggggtttctcagtagagtgcttgctctgctggctgaattggaggctatgacatgggggaaaaaagagtcacctttgtcggagcttgagccagcaaagcgccgaccgtgaacaagccagaggggacctagaggcctgatcccataattatgggcatggtgaccagccgtgctctattgctgacccagaggaaacagggctactctgcagcagaagggctggggtccagacgtgcagaaggacttcctgagaacttggtttactttttggcgcttccaaagcatggtagaattccctttatccatgaaatgcacacttagtcaacttactgtgagcaaggtcctggcctaggggttcctagatctctaagaataagagaatcttgcgtgtacctggcaggctttgggtaaaggcccgatgatatcttctagaaggcttcctcccgtaggcgtaggcgtgaacctgcagtgacccatgctggaggggagggaaagcccaaagggccttatttgggggatagctcacagtgggctgtgaattgggaggcaaggtccttcttggccaccctctagtgttacagagacctgggatgccagaggaagagtgggttagaaggggtaatgaggccagtgctacgttctccctctgtcctggcttcctgtagcagctgggcagagaggggacagctgagtgtccccttttctgcctagggaagaaggtgactccctccccacccctttttctctttgccctgtccgtcccatccctccacccccgcccttctgtctcaggagctgccacgcttcagttattttatccttcagtgtccgattcagaagtcttttcaaaggccccagccgtgtcagcgcggtgctcgcacaaaaggcctctttgatttcttgtttgttttcatttgccagtggagggggaggggggcaggagagaaagagcttctgggttttaaaatttttatttgggttgcttcattctcagaggagttggctccctggaactcctttctgagttgggggctcagagttgaacggcagccttctgaagagagggctagtgtaggagtggagggttgggtggagctcccagggtgacaggaggaggtgtaggggtttaaatatagttattgattcatcctacaaacactttgggcagatcttatgtgctaggcctaagggcagccctgcctgttgggtagaggaaaggtctgaggtgtctggcacatgacattcccctgtgtgttgcatcgttcgaggactcctcacagctgtggatttgcacagttgtgaactttgactttgttatttttccttttttgtcccagattccgcctttgaagggattctactagcatacacacttcttggagactcagtacttcagaatacaggttggggcttcccaccctaaatcagagaatgagggagagggagtgagaggtttatagagcagctaggtgtcttcctgggaatggtgtgcagaggacctgggcccacagcttgttttggactttgagggcaggtcagtgctgctgagaccttggtgagtagggagttgaggccaaaaagaaatggaaggccatgtttgtccaaggtttcgaacaagagacacccaaaccagtgcctgttggggtgcgtaccttaacacatgtgggcacgtccctatatcccagtaagaagaggtgcagcctgctggtttacatgcctgtatggaggcctaattgtcagggcttgggaagagagtgccacagaccgagactcaggcaggtggtcacgggcatcagcaacagggaagtgtgcccattgggtgagggggggctcacagggcctggttggcagacgggaggaggaggctggggggctgagagatagataaatatagctgatggcatttctgatgataggtttttcttggcaccaagggcaccgtggaaaacagcacgacaaacgcccggccctgcaggccgccgtcgccattttaagcatgtttgagtttaagggttgttggcgttagaatagggtcccaggaggaggagggcctagggaggagaagtttggctggactggaccttaccccccaggtgcctgggtcccttactttgtctataatggatatctcgtaccttatttcctggccctttggggatttaaaaaatattctggggctgccctttatgggtctgtctcccaagtgacttatttcaccaccagctgccatggactatcagtagggggcatcttggctcttctctcactcctgatgccttactgatgacatggcatgccaccaccaccccagtacagggtacttattagctgttatttggggacacccaataacttaaggggcacctgtttgtccaggctcctaacaacttcttgtcccctgtgggcatgcccttggtctctatcccctgctttaattccatttttccattgaaggccctctatggctttagcaccaggctaagtcctctctatgtattaattccctgaattctcaccctgattctagttttaagcctgtgctcctggctgggtgtgtgtgcactcaggtgatgtgcataatatgtgtagtgaggaatcagcaaaccagacctggggaccagggaggcttcctagaagacgacctacttgacctgcaccttgaaagacagtgaggaattagctcgttttgtcagctgcctgagccttctcagtgtgcctggagctgattccctcctcacaatggttgagtgatatagacagggcaggtattattgtatctactgtacagaggaggacccgaagtacagagatgacaggggactctggtcacatgatgagtttctggcagaaggggccggcttctaggtcactgagtacctggagctcattctgagggcatcgctgctccttgaacttcatcaggattactggctttggcagagtctcagaggagaaaacctcaagggtccctgttggagccagtttcatcattgtggtctctgtcactctctagaagagagcccagcttgcggctcagctcaagggctcccccagtggctgagtatgtggggtggaaacagagaatgggcacctggccctgtcctgacactggcctccctccctcctgacaggccatggctccctggatccctgccaccaacctcgagaggcagcatgctagcatagacgggctgagtctagcatagacaggggccaggttggctggatgctctcaccctgctgcagccagctctgcttcttttcatatctccctggagcatgggggagggatcccacctgaccttctcaggtagaggaggcaggaagtctaggtgtgaggccaggcaggttctgctagaccttgggattcctgatccttgcactgtcacacccttttcctgggagtgtccttggaatcagtttgaaataaaaatgaatgtaattatcataattaaccaggtgatcgctggaagttttacaataatctgctactcattgcctttttcacttcttcacattgactctcacctttatccctttcttaaagttggaaaactctcggggtgtgtatataaaaactctcctagcatgactaaggctgggttcagggagaggctggctcaccgctctagattttcgtctgtgtccatgataattagacagaggcttacctctcaccattgatatcagctccccttgagcagcatttcccaactgcggaactgttgacattcgagtgagatcattctgtgtcttgggggactgtcttggacattgtagagttttagcggaatctctggccttgacccgctagaaatcagttgcacctccctccccaaggtgtgacaaccaaaaatatctccagacatttctaagagttccctgggaacagaatcatgcatggctgagaacctctggcctggaagaaacagggattcagacagaatgccacctgtgttcacctcttgcctcaccgccagtttaggtcctcatttaccttgtgttgaatgtcgactgaacctctgagcatcgtctactcctgtgtgtcctgtgttgttttcgcttttccggatagcagagccctgggctgaagcagtttgggggctttcccctttcacctccccctggttggaactgtaagcctgcctccaagtcccctactgagttattcctctctgattttttgcatagtggtctctgtgtgctggggctgctgatctggggaacaggacaggggatctgctactgggctgacccaggcctgtgcagcaaccggtaatcctgtcaggcccgtatcagaccccaaagaacagcagacgtttgtttctgcagcatgagacacggagaccagaactgttgtctgggtcttagtactactctttttaaatgatttgattttttttttttattatagtagtaaaacacattctttgtaaaaatttaacaatagagaatgtgagagacagacaggttccccaaactactgtcctgtgcctgagacaacttcacttcgcagatccatgttagttcttcgaatttttttcatcaattcatatatcaagtaacttttaaatatagaggtatctattttaagagcagatggtatgtttgggctaattgaattggctccgtcaagtgccattgtggtcttaactcttcccacccgctgccttttgtacccttgcccgcatcatcccaagtgcagagccaatgtccctgtcttcttttccctgaggtgacagtttcagcgtgtcattcctgggaggagtgaccaacagggcatgtactggtgtctgagtggttaggatcccactctgggggattcctgctggtggtataaccccgaccacagaagtcagggcctaagcctcagcctgccctgagatccccaccaagggggctgcggctggagggaggggcccctgggaagtatcctgcttggctgcacctggcttggcctctggagtcgacttcccaagtctcctaggaaggcgagggctctccttcgtgtggagtagacccttcgccaactggcctggcgtgtccgggaggcttcctttcttaaaatggggggatgaagcgtcagtcatgcttccaggatttatttcatcataattgtttgttttgggtttaacaatacagcagggagaagagtggcagaggaagaagagcgtcctctccaggccaggggtggggctgtggaaatgagaaaccggacgagacagagagggaatccagagagggctttgcggttgagtctgccagtctggagaaggctgctctccagacagctgagagtagggtgacacctggtgactcttgtggactgggcggagctgtgtggagcgatcgggagatccccggaggcgacctgcaggaggccagccgagtgcagcccttggggagtgtgtccttattatgcctgcagattatatccccattagcgcataattattatataatgggcgttattgcataatggcagttatataacaggtggcccagaatacagacagggggtgtaataagtgtatatcctctggctataaatagccaccagccccacaccaaatatgtggtcacaccagagccaccttataaatacccgtgctgggctataaatttctgagcagtgacgtcagcgggcatggtacctagttagggggtggtaggagggacctgcggccccacccggacacatgacatcattgtttccttagtaacaggaatgctcccgggggaccaagtgaagaaaggcctttaaagggaggaggcaaatggataggaagcttgagttgggggtgggtgctaagcctgggctgaacagggtgaggtctcctgggcagagtccttaatgggtgagacaggccatctgcccttgggtatttgacccaacgggaagcaaggcagtagactccgtttcctttcatctttagggggtctcaagtcccctttcctgtgtgtagcagattctgccagccttggctgtgtgtcagggagaagaggggagctacagagtcttccctgtccttctctctcccaggtgacctctacagggctctggggccacttgcttaagggagacccgacttctgcacccggtcatatcctccccagggcatgaccacttcccctaccagacgtagtaggccagtttcagccttagtaatctaagaaatatgtgagcaatttgatgcggatctcagagagcctcgtggaagtaatggcgctgagagatggcgcctggggaagaaagaggagacaaggatagtattctggccccagaagaaactatgaggtgggatataatctttttaggtgtatgggagattgcttcatatagggtggggaagaactagtcttcatagccctgagcatagaggaggaaatttgcctttggcagatgaggggattggaagaaggctggatgaccaactcgtcctggtttgctcagagtttcacagcccctcacctcggtaaacccctcagtctccagcaaactgggattgttggtcaccctagaacagtgattttcaaccaagggcaattttgtcccgcagggaacatttggcaatgtctgtgaacacttttggttgtcacagttgtggggggagggtgctattggaatctagtgggaagagtctactgcatatgacagtcccccaggaacaaagaatcatctcgcccccaaacgtcacaagtgcggaggtggagaaacccagccttagagggagaataagcagaccctgctgtgcgtggtctctcctcaggacgcctcttgcctctgctagcagagtgggctgcttggctgccttcctgaatttcttgcagctcttgttttctgtgctttgattggttgtgtttagggttctgtggcctggaaaccttttctaggaaatcgtgtggcttctgagagggtctttcccatctcaaagctcagagaccctttgagacagtgccatctcaaagtgagacagtgctgacagcaagccctgccaggcagtatggtattggtgtggatccttcatctgttatttaaaaaagaatggaaaaatcatcaaatacctatcccttattgcctaccaaagagtttctaaaaggcaaagcctgcctgttttccctgcctttcaggtcacctcttcccatatagacctgaacaggccactgcggctcctggggcttcctgagcgtagcagtcccagggtgagaactcacttccataaaagccagtttcccagacccagtgaccagggctggactctgccacccaaagaagcttcccaaatgaaacaaatgaggcaggagcaggagagagccaaatcctattctggcacatggagtttacagaaatctaggttctaagtgttctcatgtcatttatagaagtttccgtttagcccggcatatgtgaaatgtaatcatgaaagcatagcagacactgtttttcacctgcctttagtgcctgtttagtttactacctggctgcagttgacttggcgccctctggccttgaccacatgcatagcgtggccaactgggtcatcgtttctgctggcctcggacagggcccacagatgaaggccaggatggtggtggtggcgcagtggtctggtctgcaccagagatttggccagagagaggggatcagctgggctgtgggctacccgttgtgtgtgtcaggcccaacttttgagtttggacttgagattgaggcagctaataagcgtggatggggaggaagggcccaagggtctacatgcaaggtcctgcctgctgtgccaaaggggactctgtggggaacagtgctggctccgaacacaaaggccattgctccatggagcaataatcctcaggatattgccagcccaaaagatatggccaagagagaggcctctgccctgaggacaatggccagatttctctcacttatttatggtatcgtggtttacaaagtgggcccagcacacaaatctctgggcatagtttcaaatacatgcatttcttttaaattaaacacccccccccacacacacacatacacgtgtgtgtgtgtgtgtagggtctgttcaagccctgctgctgcccaggagtgttcccagccacgtgggacagtaactgaggatgatggtactgaagccactgtctaatattagattttgtaactcagagattcattaatataattactcagatgccagcctggcttggcaaggcctcttgaattgtgttcctcttcaacaaagtgctccggctgcagaaatgcccctggtgagcctgagctctgctaccttgcctgtgaatggggcagaaggcatgtgttggcctcctcactgcaccctgggagaggcagtgcatccccatggtggcaagtcttgcctttacatgtcttgtcacgaaaacagggaccttggagagtctgctgcagaggggagcaatctgctgggcgaggccccgtttctatgcaagttggccctgggctcagctgggggccagtttattttgctccgttgtgatacttagcatgcagtttttagtttctcttaggctggaatcttggagctgggactgtgttttatccgcctttgcatctgtctctcgcgcagcttatagttttatacgctccataaacccattttgaatattgaattaccttcagatgggaagcagcccatggcccatccttgagatgatgtaaaggctcacgatggtataaaaatcagaaagggggctgatgaaggaagagagccaagatgggaaagtggcaggtgtgctctctgagtgggcattatgaggggagaatcctgacagaggaggggcagtggaagcttccagaatgctggaaggagtgtggcaggcaagtgagaagctgtgggttaatgggttcaaagagacttggtttttcaaaatacttgtttttattttatgtgaatgagctctcaggaaaatggggaaggagcagccttcttctcagccccttccttcacccctgcccccgctgagtaccttgttacaggggctactgcttggtgggctcagcccaccccaccctctcataggccttttcttggtctccttggctgtccctgctaaatagtcatctttggggacatcctcccttttggccacaaagcacacagccccccagaggccatgtcctctccagacttggtctgcggagcagccaaactcactcgtgacagggtctcttcccgtgccagatcttccctgccacgctagcctggtggatgccctgcggcagggattggcagggatcagtcctgggcccactgggattgcttgccttttgctctgaggcttttcctcgcctccctccctctcctcaggagccctggcctccaggctccttgtatggacagactcatggctgctattcctgccctccatctcctggagaccccttcagtctgggcctctcgggtcagagatgactgccgtcctccagctggtacatgtgcttgcggctctggtagctgggtttggttattaacaatgaattattaaaggaatgtgaatagggagggaggtttgtctttcacacactcgcgcacacacacagccacttctcgaagcagatcttaaagttgattctgctgccgctgctgtacctttgcttgcctcggatcttagaactgtttccagtagtttttgagtgaattccgagcactccactttctaccttaagactctctagatagctccttcctcctctctcacctggtcctaaacctctttcctctggccccatgtgccagttcttgactttctctgagaccggttttcccctctgaagtcctccttgttcagtggaaaggtagctagaggcccaccaggcacccggtcttggtagtgtcacatgccacagcatgacagtaacatgaggacatttccctccttgctaccactctttgggctggagtccacttgagcatgaaagttcaggaggccaagcctgcctctcacaaactctggacacacaggggcttagtttcacgatcagctgattatgttgttctatgatttggggagtgtgcctggtacgtacagtccctcatctgtccactgttttaaaaaggttatttttcttattataagactactgtacattcataataaaaatacaaaattagcatgaagtcagggggtggaaattaaaattatacaattatgccactgaaataactgctattaacttttgttgcattttcccttacttattcatgcacatattttattttttactggaatttatagtatagacacttagggatgctgcttttaaaatttaatactgcagggcgcagtggctcatgcctataatcccagcactttgggaggccgaggcaggcagatcacgagatcaggagttcaagaccagcctgaccaacacggtgaaaccccgtctctactaaaaatacaaaattagccaggcatggaggcacatgcctgtaatctcagctgctcaggaggctgaggcaggagaatcacttgaacccgggaggcagaggttgcagtcagccgagatcgtgccactgcactccagcctgggcaacagagccagactccgtctcaaaaaaaaaaaaaaaaatcagtaccattgtgtattctactatgtcgctatttttcaaaatctaatttttagtggtttagcatcttttctttttcttgtttgtttgtttgtttgttagtttttgagatggagtctcgctctgtcgcccaggctggagtgcagtggcgcaatctcaggtcgctgcaagttccgcctcccagattcacgccattctgctgcctcagcctcccgagtagctgggactacaggcgcctgccaccacacctggctaatttttttttttttttgtatttttagtagagacagggtttcaccatgttagccaggatggtcttgatctcctgacctcgtgatccgcctgccttggcctcccaaagtgctgggattacaggcatgagccactgcgcctggccttagcatcttttcttgttagctgcattacccctaaattgtcaacttttctaatgacttctgtcccctattcccttttgaaaatgagaaattacctcttattataagtgtaataggtgcttactgaaaaataaaaacatgcttttacatgcttttttttttttttttttttggagacagagtcgctgtcacccaagctggagtgcagtggcactatctcagctcactgcaacctctacctccagggttcaagcaattctcatgcctcagcttcaggagaagctgggtttacaggtgtgcgccaccacacctggctatttttttgtgtgtttttagtagagacgggatttcgccatgttggccagcctggtcttgaactcctggctgcaagtgatctttccgcctcagccttccaagtgctgatattacaggagtgagccaccatgcctggcctgaaaaagaaaaacatgcttttaaacagcttcatgagatttcatcatgccagagctgatgtaaaccccacccccacccccactgaggcctttgagttgtgttgcgttcatccccattgtaaattctgctgggatggacatcctattacaccaagctttgtagctgtatttgttaccttcagctaatgcttcctagcagttgaattactaggcaaaaggtatggactctcttgaaggctcttcgtccatcctgttaaattgccatctggaaacttgacaccctcaggcagcacgcaaggatccatctcactctgtccctgtaccctgatcctattccccagagcctcagaaagatgttgccatcattgtacatatcgtgtacattgcacatacatgtcatgtcaggatgcacttttacaagtcaagtctcccatccctgtcataggtgtatgtcccgttcctgtatttattctctgcatcagctcacacattccttgatggacacatggtgttacccagtgtaaaagctaatcatggacatcagcccacattctcacaccctccaatccatgtttttatgaatctgaggtgcccccttccaggcctctgcagccacttcctgttagcactgctagaaggggagggacccttgggggtcaccgtggcatggcagtttcctctcagcttctggccttgggactgcagaagtggctcttgagactgtctggtggtgagcaggtgctggccatggtatcttaatggcagcagcccccaggtccacttctgaggtgcaagcccatgctggccgccagcacgtgccagagagctcctgaggaagcagctgctgctgacacctgaggccagctgcgcagtctgccacaaggcccctggggctgccaaggtcgcacatgtcctcccaggacttgaagggggaccaggggagggtgagctgttgctgtggactgtggactttgacatcactcatagacaccccctctctcacccttgcatcccagacagtgtcccccagggccatgcaggcagggacacacagcccccttgtgccctgccccaagtccctgtgtgtaagtgagcatgctctcatcagacttggtccccactgccatggcactcttatctgtgtgcctgaatatgcatgcttattcatctcgaaaactgggccgtagggccaggtgtggtggctcatacctgtaattctagcactttgggaggccgatgtgggaggatcatttgagcccaggagttcgagcctgggccacgtagcaagacccccatctctataaaataaaatttaaaaaaaaagaaaaaagagaaaatcgggccttatatcattttctacatcctattcggcccatggaagcgtaagtgtcttcagcctctgttgacccttgtcccccaccctttctctgtgatactccaccttacccagaacctgactgtcctcaggccctgggtagtgggagctgcctcaagactcctgaggccccacaagaggcttttgaattgcagcagtggatgtgggtagttgtgtaggacagagggaggcgacagcatcgtttctcccctttcttccttcagctggggctgtggcatggcagtgtgggccatccagtgtctagagggcttgtggccacgcagtcgtgggtgggatgcatatgttcatgaggtttgctctgttctttcctctgcagggtgttcaggatgtgctaacctgcgggtgtctgtgtgggtgtctgagtgtcaggaggtgggtgtctgtgtacaagtatgggttggggtgtgtgtgtataaatgtcagcttaattcacaccccaacaacgtaagaggaaacttctcagtcatgaggttcaagttcttgttactcctatgagctgtagtaggagtgcagtgagtagggggcacagcaggtatgtaacccctgggcccaactccaacctggcccctgtggcttgtagcttctgagtcagagggcgtgcatgcttgtgagaagtgtcaggcctttcccgttcgctcagcagctgagcagttcctttctggggttctttgtgaacctgcctcgctattaatctacctgttagtaaaagagattacaattgtcgtaattacagggcgctgcgtctccaccgtcaggactgagctgagtgagaggcaagggatgggaggaacccagccccacaggaagctgctattaaaagccctctgtttggatatggcacaaagacaacaacccttcccgggggctaaggagatctgggacaagaggcaggtcaggttccgggggtgaggagtgggctaaggtcccactgcaggctgtgggatgacacgggatgactgcagtactgaggatggtgagaacagcggtggcccgccggcagctcagatacctgggagcagcacagggctcagcaccctgaccacatgggctccatgctgaaggctgctttacttctggacaggccttcacctgcatagaatggaagagacctggtggcacttgtcatggtgagacagtggctctcttctgagggagctccacagccaccatggatttaggtggacaaacagtggtatcctggtctgtggctagcatgggccccagagctgtgtgtgatgcatgtgttcctgatagcacaggggttctcagtgagggtggttctgcccctagggtatatttggtagtggctgaaaacagttttggttgtcactacttgggatggggttgctactggcatctcgtgggtggaggctgggatgctgctagctgtcctacactgcacaagacgaccccccatagaagacagtatctagccccagcatgaggggtaatgaggttgagaaaccctgactgaggccaaggaaaggaacggcagcagggcaagccaggcccaaggagggctctaagaactccctgatgctgagtctggagaccttggcccacggtgctcagcagtctgttgccagggaggtaggagagaggggcagcaggcacactgggttgacaactgcactgtgttgaccccatggcgggcatcaggggaccacaggctgtggttgcgcctgtccgttctccctcccttttctcgtaggcttcttcctcctccagtgcaagagctggatccaggattggagaatttgctcttgcccacctctccatgtcctcgttgccgactgaggcacctgggagtgaggggcttggacattcttcctcagcttgagccccatggacccctccaggtgggaggagtccagaggaagatacgcagaaataggaagggctgacactctccagcttccatcttgcaaggacacaggccccaccctggcttctccccaacacacatctggcctggtttctgctctgagaaatggagctgggtggggcagaggcctggcaagtaaacctggatggagtgtaggaagcctccttccaccattcattcctgttgaccaaaggggcatccctgcaggcactcctgcctccttttccacttttgttttcaactttgactcccactaccaaggagttctcgggaaagagggtaggcctgtgggttaggagggcaccatggagggtagtctgtggggctgggtgagatgggtgtgggaacgcagccctgtgtttaagggtatgtgtgctgcctgcttgctgtgggcagggtggcttctgatgccctcccagcccttgggccactgtgtcttgtgttttctgcagacaaagcatggagattttcagctgttgtgaattctgcgtttcacaccgagtccctaatagtggaatcgcgttgccttccccccccctcttttttttgccttgacagctccaaccttataattttaccttctttttccttgcatacactctttttcttccctttcccgttcctggggcttttgccattcatcgctggggaccccctttaggagggattgctcctgacaagaggggaggggcttcctgtcaaacattgggagttgatgttttgtttggtaaaatgtctgtaaataggctgtgaggcagtcgttctacatggatccctgtgtatgccagcgtctttttgtgtctgagcatgtctccaagcatgtgaatgtcaggagcagagagaaagggaagggaagaagaagggaggagagagaagagggatggtgtttgggggcattgggatggctctcttccttcttggtctaaatcacagagcctgatcaggagagggtcagagttccagactcttgaagagtcaggaagaacatcagaagtgaagctactgccatctgaggtggccctgggttggctattcacagagggctggaatgggatgatggggctgtactccccactaaggctgccagatctggaacttgaccttgaagtctagttatccaggactcttaaggctctgagggtaggttgtaatggagactgtttctcctgcccagcatcaacgatgagccttggattcttgggatcaatatcagtcttccaccgtgaatgggaaacccatttctccctggagacaggttcctctgcaagaccactcccttattcttttttctttctttctttctttttttttttaaagtaggacgccttgttgctttagatggactcctttgttaagcttcaggtagcttacctatcctatgatttgatttacagcaaactcactaaaaacattggtcagtttgatttcaaaaacgtggccacatccattttcccgccatcagctttccagaccacagaatgctctgcttttgagctgctcctcagctgacaccctccttgaatccattttgagttgctcttccctggccccattagaaaatgtcggctctgactacaccatgcttgcgaacaaaggtgcagaacaattttggctgcttcgtccaggaaataaattcctcttcggtgccagaaaccattgagtggtgccatgtgttgagctctaggccccagaactgtgggcagggttattgctcagggtgaggagtgtggaagcataggataaggaggccatggggaggagacccttgcttcccggacatccccacgtactttgggtcaagaacctgaggacttgccatgtcccctgctctctctctcctggctttccatctgcagttgcccatggtatggctggtctgtggacttggggaagacaggcccctctctttgtcccatggtggcagcattccggcccggttaattgcatgccacccttcccaggtcctcttgttccgtctgctcgatgaaggtaaaggctgatttccctgggatctgcccatgctctgcttctcgacctgtgttttcacctgtaatcagcaatgccacttatcagtgtctctgaaccctatctcatttaagcccatgacagtccagtgaactcggcacttttataatccttgtgttatgcctagaagctggcagacggaagaatcttgctcaaggccacccactagcgagcagcagccctggggcctgtccccaccctgcacatctgcccctcactgctgaccaccctggcttatctcagggtctgatttctccttgtgaactctaaactcttctttccagctaccaggcagatgccttgtggacagcttgcccccgtatccacaaggtacctcccagtactcctggctgccctctgctccctgctccattccttgtcttggctgtgggcatcaccacctagccaagcacttgagccctcacaaccagactaaccacaggccggtgaaagggctgaagcctccctgccttttcaccaggctgagttttcagaactcagtgtcttctcctctctgttgtattttttttttttaattccccatctccccaggttggatttgtcttttattaagatataattcacataataaaattcactattttaaagtgtacaaggccaggcatggtggctcatgcctgtaatcccagcgttttgggaagccgaggcaggaggattgcttgaggctaggagttcaagaccagcctgggcaacacagggagacctcatctctgcaaaaaataaaaaataaaaaaattagcagtacttggatttgtattttattaagatttaaatcacataataaaattcagtattttaaagtgtacagggccaggcatggtggctcatgcctataatcccaacattttgggaggccaaggcaggcagatcacttgaagtcaggagttcgagaccagcctggccagcatggtgaaaccctgtctttactaaaaatacaaaaaaaacattagccaagtgtggtgatgcagcctgtaatcccagctactcgggaggctgaggcaggagaatcacttgagctcaggaggcagaggttgcagtgagacaagatcgcgtcactgtaccccagcctgggcgacagagcaagactctgtctaaaaaaaaacaaaacaaaacaaaaattagccatgcacggtggtggcgtgcatttgtaatcctagctacttgggaggctgaggcaggaggattgcttgaacccaagaatttaaggttgcagcaagcgatgatcacactactgcactccagcctgggcaggcaacagagtaagactgcctctaaaaaaaataaaaaataaaaaaataaactaaaaattaagcataggattcagtgccatttagtaccttcacaatgttgtgtaaccatcaccaccatctaattccagaacaattccattgctcccaaaagaaactccatacctattagttgttagtcccaattcctcattcctcctaggccctggcaaccgctaatctgctttgtttctatggatttgcctagttgtggatgtttcatataaatgagatcatacactatgtggtcttcatgtcgggcttctttcacggagcataatgttttcaaggttcctatatgttgtagcagcaagtgtcagtggttccttttttttttttttttgagacagagtcttactctgtcgcccaggctggagtgcagtggcgcgatctctgctcactgcaacctctgcctcctgggttcaagcgattcttctgcctcggcctcctaagtagctgggactacaggcgcccgccaccatgcccagctaatttttgtgtttttagtagagacagggtttcaccatattggccaggctggtctcgaactcctgatctcgtgatccgctcacctcggcctcccaaagtgttgggattacaggcgagagccactgcacccggccagttcctttttaaggccaaataatatttaattgtatggctgtgccacattttgtttatccattcatacattgatggatatttgggctctttccactttgtggtgtgagtaatgttgcagtaaacatgcatgtacaagcatttatgtggatgtatgttttggattctctagggtatatacttaggaattgccctgtcctagagtttcataactgcattccttgtgcatcttgtctgcccagcagtgctgtccccttagtgggcacccagggtctctctgggttgggcccctgctgacccttccatcactgcatttctttacttctcctatactgcatattccagcatttggagctctctatagcccctgagtgtgctgtgctattcctgcctttgggcctctgctcatgtgtatctggcatggtcccttccccttttgtctgacggcctctatctttttacccccggcctggctgtcacctccttggtgcagccttgtcccgcatcacttctcatcctctgaggccagtccctccctctgagggggcctccattttgtccattacacaccagctttcagctgcaggggggtgttacccaggcagcttctctggctctgtatctgtgtggttcctggcgtctagcaggtgccaacaaacacatgtggaattaactttaaggcactgcatgtgcttttccaagtgtgcatgtcacagatctgtgtgtgacccacacagatttgtatgtctgcccctgcagacatacaaatgaatatagaatcaaggtgtacctcccattactctctggacccctgggtgtcggtggcctcatatttgcttctctgtgacccagacaggacttggagagctctagagtgattctgaggaaacccagtcccctttaacccaaacaggtgacctaactgttccagactactggggaagctctggtcacaggggacatgcgacctgtcttttggctctttcccttcactcctctaagcatgtggctgagtagcctgcagacagatggcctgtcccttccgtccttccagaccagcccccttggagatggccctgggcagggagaaggcaggccccaaagcagcctccaggtcccgggagaaaagcatagttgctaccctggtgttgttggtaatgacttggcagtggagggaggagggtgcatacctccaggaggatagtagcaggggagccacggagtagctgccccatggcttgggtactgtgctgcagatctcatcgctgaaggtgtggctaaggctgtcccaccaggtgtttgggatgctgtctggcccctataccagccccactcagggccagagggctctaaatgagtcactcagctctggctttgccaggtggcccagggtagggggatgcctcaggtgggcacatcacggtgctgccaaagactcaaggaggaagaggggtgtgtctggccactacccagagctcactcagggtactagggatggaagggaagaggaggggaatgctgtctgacctgacagcattgcacaagtcagccgtcctgcaaggtggctctttgctgcttttcttctcgctggttctcccctgtccttctctagctgggattccagctctagtcagccagtgacatctcccccgtacccaggccagtgagccagatttttttccaagcctcaagtcaggcaggttcggggaggagacagcctctcaggcgagtgagctctagaggcccttcctcggagaagcccagccctcctcctcctcccttcttggccctctcctctccctgggcctcttccccacgtggctcattacaactccagttgttcaggtcttgacctcaagagccttccctattgacccctgaccagcgatactaatctgtgtcaacaggccccaggggttaaagaaacacaacccgccgctgccgccttagcaggtgcctggagggggcggggcggctcccgggagcagccgggcggctgcgggaaggcacttcttaggcgccgcctcctcctcacagcgcccgccttctccgctccggcttcatgctctccaggtttctccacttcctttgcagacctccctcctgccgattacccactcctctgtgccccatttcccttctgtctttcctttgctgtccactctgcttgcaggatttgggaccaaacgccctcaggcatccaggtggtgcccgggttgatatgcagctgcctgcccttgcacctctgggggcttgttaaaatgcagatcctggggcttgtccaagtgggtaggtctgggcagggctcgtgaatctgcatttccacctagtacccaggtgctgttggtcctccaggctttccccctgcctctgccagctgctgcctctctgagatgtgctcttttgtctccaggaatggagccatccttaggagacagaggcacactgctggccatctaggctgggggtagagcccagatgggagcccacctggatggcacgaaccacctgagtgatccccctgttctcagaacacaggtgggtcacctgaggatgtcctggtgacgatgcaggagctgccaggcaggaccaccatgagtcactgggggtcatgccagtgagcttcctgcgctgctggccctggctctgctgagggccatgtcagggtgaagggggcacactcctggcttagataagacaatccagattctctcagagaaacagtcacatgtcagacatgtgccctttcttgggctgaacctagagttgttcatagcctggccttaaccctgccgattccatatactgtgctcatctcgacccagttgaggctgtgcttctgtgcttcttggaacggctcggctccagggccgtgaggttggcaccccctgcacccgtccacacacacagaccagaggagtgaggatgatgaggacagggacattaatcacagttctgttctgcctggcactgcagcccaagtccccaggagtctgtgtcttcccatgttcccttcgtcctgttcacagggaggtggaaatccagacagaaacctgccttctcctccatccccacttgaagctgctggtactgcctctggccatccagccttaagacgtcccttccttccgtgtggccccacagccacaggctgcccctcctgcacagtgcacacatgtctggcaggagatggcccagagaaggtgctaagcagaatgcggggtagggcttcatcagggcctggtgtgctgggtggtttgacagtgttttgtgggggtctttcctgtagctccaggaaacctagatgggggtcaggctggctgagggagcacccttgggtgctgccctttttccgagtgctctgcttctctttgactttactctctatcccctagtcaccccaacccactccttttccttcttcctcttggctgtagctccctcacagggctggggagcaatagacaaactctccaaaaatattttttttaagtttcccaaacttttccagatgccaagaaggggccagggaaactgcaactgcagaggggggaaggggagaggaaatgttccaaggccttccctcccttccgcctggaggcgaggataactatgggagcagggtgactctggtgccctcagacagtccacctggaagggagaaaggcccctaaccatcccacccttgctaccctccagcccatcctccatcctcattcccaaagcccccagcagcatgtagaggtagaggcagagaaggatgtcagtggggcacctaggaacttctggggttcagaagggtggatttgggacatatacccccaccagttgagggaggtcaggagctgagaagtaggagaatctgtccccaagggctccctccctgggagtctggggcctgatagaagaacctgccactgctggggttgaggtgtgggggaacagacaggagggggtggtgtgtgaggacagtacagggatcactgccctcccccagtcccaccctcaaggggtgctgcccccacctctaccattctgtccatccactccctggacacctcctaaaacaaaggcctctttgtggtcctggcctactggcctgcggccagcggcattctttgcgtgtttcctgagcacggatcccagcttcgtggtcagctcctcccccacccagcctgcttcccggcctgactcctggtagctcagagcagtcccctctcctgtcctgcccagggtcctcccccagttcccgtctctaccgtggacagatctggacagagaagggaaactcccaggagcttggccactgggccttcggtgggggttgggggacaagtggaggttcaactccatcccagctccagctgactttggtgggtttcgccgagcctctgttgatatgttctcatctgtaaagatggggaaaataaccaccccttggggctatcaggcagattcaatgtctccaaaacacagagctcctgcttgccgcagagtggaagaggcagtgtgtaactcgagctccccatttctgcactgctccctgggttcctagggggctggaggtgggcttggtgggcggctgaggagctcagaggagtctccagagtcttgggtgggacgtttccctgcactcctgtgggtgccccaaacctatggcccactcctgggagtgctgaggccagtaccccagggagtcctactccaagagtcggagctgggtccgtagcaagtggcctgcctgtcctaggcctggtcttgctctgtgtgcccccagcccctcctggcatccatgtcactctgtaacagcagtggggtgtcctccctgggttaggcatacagggtggttggtgcctagagccctgaaaatagcagacctgaggagggcgggggtagggggaccaaggagggatggcccagcttttggagaacactttcgaatgtcagcagatgcacacccttcagtcaccagccacagtcacacacagagacacacacagtcctaatgaagtcctagatcactgctttggggggttttccccccctcttgttaaaaaatgttcataatttggaaagaaaaggagctttttacaagctggcggctctagagaactttccgtcggttctttctggcctcgtgatgggtggggcccacttttcccttccttctctctctcccccgctctcctaataatcccccctttccagcctcaccaaacacacacaccctttaggagacctcccgccggctgtcaccccaagaaagctggaggaaagccgaggacctgtctgtgccctcctgggccccatccaagcgccaggcacaaccctccccccctccccactcctccctcccacttagaggttggcccccacaggcctagagtcttcagattgctaagcttcccagaatctgtgcctggacccaggcccagcagcctgcctgcccttccccgagggcctgccccactctcccgcagggtgagggtcccccgagtccttcttgcatccgggggccccgccagggagggcagtgctgagctcaccgcctcggcatctgccctccccctgcctctggtgcgagggccggccgcactcccgccagtgccttgctccctaatagctttttaagtccaaccacatgtgtctgtggagtgaggagccgcccctcacggggcctcggctctcctcctccctcagccaagaccaccctccacttggagcagcctcagggctgggggaggggggggtctgcctcctgagagcccatctgctcgccccgggcctagctgaggaagaagggggcgggggtctcttttgggagtgtcgcgtgaggccagccctcaggctcggctggccccaggttccccagcctctcctctgggtcctgcagtctaggatcctctctctctgtagggcaggccaggagggactggcttctgggtgtgggagcctgggtgaggagtcctcatctcacctcgcgcctccctggccagggactttggccagcaaatctctccttgcacccagccccacggaggtgaccccccagtcgcccctcaactcaatatacgtgtggttccctgtgcgtgtgagtggtctgtggggaggcctgtggggtgcggtttcgcaggaggggagtgagggctgaaaagcaacgagctagcaggcttggggtcctaatgagaaaattgcttccagccagggagccctgctctgcggctgaaattgcatccagccccagccaactttgctgccgcagtacccgcccttcggaaggagttggggaagcaggcgggcagggggaggagcgggctttgcacatgactcaggcccccccaccgccccgttctatatgaacacaccttgaagagtctcttctgcctcacggggaggagcttgagggtcaggcttggctctggacccgaccgtttgatccttgggaggcagaggagggagtggggagggatttcctttctgttttgctcagttctgctgcacttatgaggtgctcactgtgtgcagagggcttggagaggtgagcttgcataggctgggcccacatagggtgggcccacccacccggtggtattcactcttactgttaaagggtgttaggagcactttgttttcacaaagatcctgcgtggagtcccgccttctaggatgcttcatttgaaattcggcctccctggagtggggtgggaccctcttgcctgtccttccactcgggagcccagtgcctacacccgaggccagggaacccaggggtgaaaacctggcttagctacattcttctttctgttcctcacttacttggaccattgagcagaatcagctgcagaatttgtggggcccagtgcaaaatgcaaactcagggcaccttgttcaaaaattaagaatttcaagacagcaacagtggaagtcaaggttatgaagccagccctgcttccaaggaaagctggtaccacccagcagcccactggttcaggggctgtggcctttgccctgatctgaaacaggaggttccacctgcttgtttcctggatcctggggaatctcttcccaacctgggacggtggtctccctgctgctgcatccctcagagactctaactttctggattttagagatgttgcttagggaggagggctatgaggggagggaacagaatgagaatggatcacaccttcagtgcttagagagtctcagggcaaggccgcacttgtcacccttaggtgaacctgacagtggaaccatatccctggtgaggtggaacctgcagcctgctgggcccagccagtagcgggtcagtgggaccttcccctcctcgggtggagcctcccccaccaatgacaagttctgacggctgtgcctgtgcagagcggggagcgagcaggagtgcttggagggagggaagcaggcaggaggaaggaaacaaccccattgtcatcccccaaattactggctgggatggcaggggaggaggcggaaagccgacattgtttacttaattaaaagtaaacaacaatttgccgctgccagcctcccattagctgtgtgcgaggagccctacgagctgcagactcggctttcgctcccaccaagccggctcctgatgccacacccccagcctcggctccccagggccccgggccctcccctgctcatgtcctcctcaggctgaggagaggggaacaagctattaaaagtaaataaatacataaaaagaaaacccactagtgtctcagagtcctgtgggtcaggataagaatgtcagaaactgtcatgtggcaggccagcatggggcctagagacccctgagtgtgtacactgaggtctggttgtggtgggctgggcagggcagggggcacttctttgtccagtaagccagatgttggactacctggggaaggcagcccctcccttcctccctccctccccgcaaccgaggccctagtctatactacctggaagcctgggcctctctgccccaactcccactttttccttttcccttttagcagcttataaacatccttctcccatctttttggctctgctcccagaagggggctgttcagggatcctggagggctggggagagaggcaagctccttggggcctgaggggagaaagacagctggaactggccccacccccaggacagtacagctacaagtgaccctaggaacaggggagggggttgccctaagttggggtgaggtggggaccctcccagctcctgcttctctggagccttcaagcaggaggggtggttggatggcaagaggggttttgcatgggcttccaccaggctccaggggctaagcaggacacctttccagggatctgtcctcaggaaagccctcacctctcctgtaggccctgcctgcaattatgtagagcacaggcttccatctggacctcggtaggcatgacctgaggcccatgactttaaaagctcaggatgtgcgctgggcgcaggagctcacatccgtaatcaatgccagcactaggaggcccagaccagagggtcgcttgagcccaggggttcgagaccagcctgggcaacatagggagaacttgcctcttctaatagttaaaaaggggtggtagcatgcacctgtggtcccagctacttgggaggctaagtagctgggaccacagctgcatgctaccacccccagctaattttttaggagagctaggagggtccttaagcccaggagtttgaggctgcagtgagctatgatggcaccactgcattccagcctgggtgacagagcaagaccctgtctcaaaaaaagcaaaaaagaaacagaaaagaaaaaaagctcagggcccggatactgcagggagagaagtacaggagcacatgaaacgtacccagctttatgaaaccattgctgagcctccttctgggggccagacaggcaaggtggggaggggtaggtctgagaaaagagctagactgagtgaatgaaacagccccaatccccagggtgtgggggttgagaaccctggtctggagttggtccctccaggaagatgtaggtccccactcttccccggagccaccgtctcacctttctcttgtcccatcccccatcctcatttgcctcctctcatcttagtcctccaccattaggattcacacatccacatgcacgtgcacacaagcgcatagatcccgggattcgtgcacatcgggattttcacatgcactcacacacatagacaaatctgggaagtctgtcccatacttaattgaattaaaggactggggtttggcaggacattgtgtatctgagctgcagcctcttgcagccgtttcaagggctgatggttcagtctccctgtaattccagccgctgctgctccctgtgggcaggtggctgggtctgcgcctgtcgcctctccccttccccttctctctccttttacttcctaggccagagccccccagcacagggcctggggaggctggggacacccagtgtattcctcctcccttctcccacttgcattctgggagctagtgggaggttagggcctcctgaggaggaggtacccccagcgtgaggccaggggactgtcagaatagaacagtccaggcaaatccctccttccaggttttctgctgcccattcttggagtgggagctggaggctgcttgccactggttggaaagtggacacacttcttggccaagtgtaagccacctggctttaaaaggtggagagtctggtctaaggactttggggaaccctactggagtggccaggagccataatgattgggggagtggtgccagcagatggggtgtgctgcagggcaagagggatgctttttttttttttttctaatttgatttaattagaattcttttttttttttttttttttttttgagacggagtctcactctgtatcccaagctggagtgcagtggtgcgatctcggctcactgcagcctttgcctctggggctcaagcgattctcttgcctcagcctcccaagtagctgggactagaggcatgtgccaccacacccggttaattttttttgtatttttagtagagacggggtttcaccattgttgccctgggtggtctcgaactcctgagctcaggcgatccactcgcctcagcctctcaaagtgctgagattacaggcatgagccaccgcacccggccaagaggaacgcttttggcctccatttcttccctccacttcagcctctgctttggcaggctctggggtgggagtaagcctgttctcagctcccctttactagggacaggtaattccactctggctgctccttggagaacagagtggatgaactcagtccccacctctcagagggacctagtacagagcccagcccccactctgaggaagccttggatgggccattcctggcccagagcctgaggccattggaaagggcctatatctggaacgggtgaaggagagagcccgggagcctcactgtgggtgggaggggcgtggtcagccagccttgcctcctggggcatcagctcccagcttgtgctgcaccctctgaccacaactttgtggggcgcctgctgtgtgcagaatctaccccgaaacctatagcttaggagaagcctgggtaagctgctaatggctggtagtatgggtgtccaaggacctgttggaggagcccagtccagccctacatgtgtgacccttggtgcctggcaaggcgggggggtagggagcagccctcgcacagccagctagactgttttgctctggggcctgaggattgcggggccagggaagcaaccaggcccagtctggggccctgtgaagcgatctgcactgcccagggtcagggggatgggggggtcggcctcacctcggctaacctcccagcggaacaaaggggcctttctccacgcccgcccgggagggtgtgcccgcccggctgctgccgccactgcagagggcgctgattttttttttcttcctgacttttctccatttctgtctctggttcctgatctctgacttttattctccattttttcactttttatggggatggggtagagatcttccttttcaagtgtttaccaattgcagagacaagtctgcactgccaaaaggtgagggcatcctgggtgcgttaggaatactccgggagtcacgtggccttagacccccccctcccccccaaatcgagggcagctccgttctgaaagaagcaggcaggattcagagcggcagccacacagggtgggaccgggctcactggataacccccagtcaagctatgcacctggcaggtcccccgccttctattcgcccacccatttcgcagtcccctttccatccggcccatgcaccgcaagctgttcctaatcaatgcgaacgggaaactcggccctcatatcacgggatgtgtttggcagcgacagcaacaggagccgctgccacgggcagctccttccttggtgcataaaccagggtcccagtggcctgggcctgagtgggttcttctccttcctcttgggaccccctgggtatgcagagggaaccacatcccctggagctctgggccggtcgctggccgcgccccgccgcagccctcggagggcagctagtgttaactcgctgcgccacctagctatggcgtccaggagtgcagcgcttcgctccctgaaccgcgtcgcttcctgagccgcgccgctccctgagccgtgctgctcggcagcctggggaaaacctctttttggtccttcagggagctatgaatgaggaatttggcagctgtcagtcggaggatcagtgtcactttgttccttcagcagcctttgctgtccttatgcaagcttggtactttatagtatataaaactcaaagttaaaatatgttaaaaaaaaatctgtaaaaatccccactcacatctcatgttgctgagcaggtcttggttgtgttgcaccaagaagcaggagagacacactggaggtctaacagcagcaagtctaggatttggagcctaggcttctgattccaggcccagggctctatgcagcactcggtgccgtcctattcaacccatccctgcccaggctcttagggctccaagctggaaatttgcagtcaaaggcccagattcctcgtatttcctctggacagctctggacagtggctgccttcgggtctccagggcaaggagaagagcaggcctgcgagagagtgctctgccttcccctgctgtgctgttctcagtgaggctccagttccttcctctggtcattccagcccttgagtatggtgcaagtatgttcagtcctgtgtctggaaccagctcggctttgcaggaagattagcagcatcagggtttccacattaattcactggacatgagtgtcggtggttgggctgcaagaaagctattctttcttcaggagggggaagatgtcagctagctggtgcctctgttccctgggtggtcagtgtagccatggtttgaagaaggatctagaagggtctctttggagtcttatcatccactgcagctgtgctttgagatgtgggggatgtagcagcaaacaaaaccaacagagagggcttgtcctcaaggggctgatggtctagtggggtgttcctggtcaggacctcctggcctgagtggcctggtggccaggtctctggggctctcatgccttccagagctagagcctcccacttccccagccatggaccagccagaggttccctgtgtaggtgggatttggaggaaaggctgtttagtttccagcctccaggtgggagaagggccccacttaaacatctgattatggtgggcatttgtgtttgttgcttgtccatgagcccagggtcagtccctgctccaccaaggcaagtctctgggtgaaggaggcccctttggagtcaccagcctgggtactgagtgctctctcacaggggtattgagtgctctctcacaggggttgaggaagttagcacctgaggaggggaggcaggtggcttcagcctaactcccacttccccttccccacagggtgaattgaagtcggtgggttctacagttctaatcccaggccctgaggtttcctggatggattcttccaaggaaagggaacagtggagggaggcaggagcagaaccctgcttaaggccagaaagagagcagggggcagagagaggtggtgggggaggctgatgctccccaatccctgccgaccctctgtcctttttgatttcctcaggcaaataggcagagagcttagggaccttcccctgccctgggctaaagtgaatttcctgctctatagggtctcacttcttccaccttccttttcttagccagttgttccttctctgagccttctccttttccttttcttcttccttccctcccttccccagaagcattcaggggtgggtgagtaggggctccttgtcctggggtctccccagttcctcactctgctgagtgcccaccagacagatgctggcagctgcatgcagcccagcagttgtgcacacaaagccactcttgagtatctttaggaaagttttcctctttctgtttttttttttcttcgcccaaaggaataatttcctctctgctcttttttgtttttgtcccctttccctgcctctctcagaatcttgtactgtactgctctgattcttcttgccccagtcttctttctttgctttggccctgattctctactgtggctcctcctctctctccctttctctctatcttttagttttagttttgtcttttggttgctctctggctctggggcttcctgccttctcgcatccctcctccaaactcctgcttgtcccaggcgcatcccttgagtggcctgcagagcctccgcctcctgtttctcataccaggttggcattagagtctggaggactctgtccctttatgaataattagaccaagggcaagtgtatttgggggtaggaggagggtgatgcccagccctgggaggttgggacactattaatagccctaagagcagctgggggtgagggtgattgtctggccagcctgtcctgtcctgggcagctcaaagggccagaaagggcagtgctggaaatagagaaagcgggtgggggtggaagagcagctctgcaggccccttgctgggatgggaccccccccctccccagggcccctctcttttcttgacatgtggggtatggagggcattctccactgtcagtttttcttcgtcaagttggggaggggatagaagcttcaggggctgggggccgcttgcctggaccccaccatcacatgactcttggccccaggccctctcagaaatgctggctccagctgccggctgaatcgtggcaccagccagcactgccaggagaggcgcctggcctggacgcccatgggcctgtgcctgtgctcctggttttctcagctctctgtattccaaggctgggctgggctgggcaggccttgggcctagcactcccagagtctagggggacaagctctatcctcccttttccctgttggccctctctcccccacccctgtttctagtatggtgactgtcttgagaccgttggatggctattgcacaccgatgtggggagggatatgcctgtacaggtgtctgcccaggctctgccattatatttgcagagaaacctctctgttgctctttgtagatggtagtgggccaggccccaagggagcccctctgttcactggcagtggtccctgggtcaagacaccaaaaactgcaatctaggacacactcaccatgtactcaagagcgtgagctcctggggaggggagctgagggtcagccacagcttcccccaccagggtgggaggtggcatttgaacagagttgagaaggaggaataagcattcagcaaatggagatgaagggaaatagtaatccaggtggaaggacaggcgacatttatgtagccccaactatgagccaggccctgagctaagcaccttattatacatgttttctcatttattccttacccaggaatgctaatggtaggtgttatctcccttttacagatgaggaaacagttcataacttgaccaaagtcacaggctggtaggttctggagcacggatgtgaattgggggagccttggtatgccgttgctggccacccacctccttcctcctcctaccctccatttcagcatgcccccttcggcccctctgtgctggggcaaggccagctcacccaggatagggtatccacagtggtagagcactgtgttgtaccccctcagtggacacaggctccagaccaagggcacctccctgggtaggccaagggcaggctcagaggacaggggaagcagacccaggccaatggctcctgcccaagatgtttttctttgccttcttccttgcctgatctttgcctgtcatcttcaatctcttctgctctgatgggaattcctaccccaggtatctctgaaacaccccagacagtgctgctgccatgccctgggtccacttgttccctccatagtcaggtatctgaggtgctaggtttggtgctgggtcaccttgccatgggcagacacaggaggagcctgcaggcccactcgcatgtcccattgctgctgtggctgggggtctcatttattaactgttgggctgatcctggagtggccattggcaggtgggcctttgtccacctgctgggtgctctgttgtgcaccaggggcatatcccttctctctctcctttgctggccactgcctgtcatcccttggggaagagcaactgagcattcagttccccagtgcctcctggcttcttctgccgctccatgcctgggcccatctaaaggagttctccctgggctggggacggctgctaatgaacgggagccaagcagagaacgctgagtagctcacaccagaagaactccctggagggctccggggccacttgctggggatggaagggaggtgggagttctattgttttcctggaggaaaattttaagcttaggaacacctttctcattatatgagggaggcagtgatgggctgtgtggctggaaggcttctggctatgagtctatctccacatggggagtggaggcaaccaaggactgtaggagacaggccttcttcacctcgacaccgtgtggggcctgaggctttcagatgaagtgtgagactgctctgctggtctcctgggtacaagatgagctgatggacttgctttctcctcgcttcccgaagccttactgccgagctgtgagtcctgtagtagccaggcctggcacttgctccaggggcacccgtagaggccgggatgtgttggaatggagaaagtagttcttcctggggtcaggggatggagaggggaatgtcccatccagatgctggcccttcatctgccaggttcctgtgccttccctacccccccgcccccaacaatggcttttcttgagcctaggccctaggggcagccagagcaggcctagaccacatgtgggtgtcactcggtttcttcctctttcctgtcacttatcccctctgccatgtcctcttcccccatctccagcaggtcagtcaagtcaaaggcagaagcccctttggatctgtgagcagggagggaatgaggaaaggggagaggacgataatggggtgacatgttcccctgtccttatccctgcccccacccacagcttgcgggctctgcttcttgttcaggctccggctttaaaccatgtgagactctagggatgacagaggagggaaaaacctgccacctcaggatgactccaggatgtgtgtgtgcatgtgtgtgtgtgtttgtgcacatgtgtgtgtgcacatgcatggtggctggtggagcagggtgaggaatggagagaaggagaggaagatcctagaagccccgtgggcccagaccctggccaagcctcatcccccggccctctggctgccctgcattctcaaggacttccttggtcccctgagtctcctgtctgctgagacggggagaacccctctgtgacccgtccccttagccccccatctatccaccgttcccctcctcagggtgtctcagattctcagacttcagtttcaggaggcacaatagttacattctccagctctgattgctacaggcagggcctctggctccccttgagattgggtttcctgtgccctggacgctccagaatctcagaggaagcgggagagaagtaggaggcgggtgcagtgctgggagggccagtgattggccccagaatcgcatcagcccttcagaggatggggtgttgcagctgcccagaggcacccccagaacagaatgtacccccacttgcttctggaatgtcaggcctgggagggccaggggatgggcaggcacaccccaagggctgttctccccgtttccaaaggccagcggttcctgcagagttgaaggggattcctctctggtggctccagatgtaccatctcactccaccctttctggacggcaagaagtggttagtggcacctccgtgtgtgtgcgcgcgtgtgtgtgtgtgtgtgtgcgtgtgtgtgtgtgtgtgtgtgtatgtgtgtgtctgagtctgagcatatgagtgtatgcatccaagtgtatgcacatacctgggtatgcatatgtgggttcagctaaggccaaatctgtgcacacccctcagcctccataaaacttgttaggccaaagtccgtgggggcaattggccagcaaattatacatggcccctttcacagtacaagtttgtttcgagcaggagctgagggcagtgttggctgtagccagcaggaattcctccctcaccctagtgggagccataactacctccccatctgtaggtggaaaatatatatatatatattaaaaacatgcatccgggcacggtggctcacgcctgtaatcccagcactttgggaggctgagacgggcggatcaccaggtcaggagatcgagaccatcctggctaacactgtgaaaccctgtctcttctaaaaatacaaaaaattagctggtcctggtgacaggtgcctgtagttcccagtactcgggaggctgaggcaggagaatggcgtgaacccaggaggtggggcttgcagtgagccgagatcgcaccactgcactccagcctgggtgacagagcaagactccatctcaaaaaaaaaacaaaaacaaaaacaaaaaacaaaaacatgctgtcagttggagtttatgtgcaatcccaggctcctcctggctgctggagcttcccctccagagctctactgaagaggcagtgtcctcttggaaacacgcacaagcacacgtgcctgcaaacagcagaaggaagaggggggtgctgaagaggtgagggggaggcaaaggaaggacagagggaggggagccaagggagacagggaagtaagatcagaaatggggatccaaggggaaaggcagctgaataaaagaagtaaggtggggacttgttccaggggctgagaaggggagctggtgtgggtgtgagaagggcaattttgcaggagaactttgtggctgttccagaggttactgaggggcccccaaggaagagaggggcccagagtggccacttggctcagcctggctctggtctgggcactgccagaggcctccagcccacaagctgttgttgctgtggaatgaccagtggtgtgcagatgaatacagagtggccccagaacctggagccaaatcccgtttcaaaggcttcttcagcagagcccacttgggcccatgcggagggagtccagtcttattgcctgctccttcgtagccctcccttccagaagcctgcaaagtggccagaaccatgggcaggggaggcctctgcctcagagacatggatctcacgagtagcccaggtccccagagaaggacagcccgcagagctgcgtgtttgtgtgacacgagccagcctgacacccccaaacagcatcgagaatgagctgtgggctctgagatactctccctcccctagcctggcccagaaaccagggaccccgaatgccagcctggccaaggcacctgtcggacacagcggctgggctcaggttttaggcagctgcatttgatgggccaagtgggaagcagctaagagcacagaaagaactctccagcttccagcaccagcatggagggaaactctgagttggtgtggggcgaggggaagcagcagcacccactctatcccatctccaaccagtatctccagggagcgctgggagccacagtccctgaagagactgggagggtggttgggtggccctgaacttgggggtgcacagttagtgtccccactggctggcaagcaggctggaaagaagcctgaggccagaaaggcttccaggggacatggccccagaagactggggaatcagagagacagtcctcgggggtgtcggccgatgacagaggataaaagatgaaagatggagcccggcacctgcccgcgttgtgccagccaacactgtccctgcccctccactggcccataggccaccagctggcccattgtccccagtgagagagcagacactggagggggctcccttgtgggcaggggctcactcatgtacgcctgcctggcagggactgccagggcagagccaccccgggctcaggggcgaggaggaaagaagtgggggtggccaagagacagagcgtggagactgagtgggaggcccggccagagtccgggaggctgccctccaccttcagagtggagaacagagccctgctgtgctgcagtcaggtcccctcctgtggtgttggcagtgggcagtgtgcggggcctgcgaacaggagataaagaattcaggcagagtgttttttctcactaaccgtggatttgtgtatttgttcagctggtggctctgataagccccattctgccagataaaagcagagcagccacgaggcagggcctggggaggggcatcctaaaggggccttcctcctttctgtcccaaatcccagggttatcccctcccccggggaagcccagacagggaaggcagtcacgacatggagatgctctgcagctcctgtcacctgtccagagcaggtgtagacctcaaggcaaggctccccaaagagcctgccaggtaagaaagctggcccacgttgtgcctctggtgggcaggacgtctccttgcctccccaggagctgcctccccaggagccctttcaccatggacctagtggcctctctgggccctgcagccactggctggttcctgccagcctccttcctctatctatccaaggcacatccccgagctgacagggtgctcagagaccttcccccgtcacatccctggtgtcccgaggtgcctgcggccctatcggggcaggggtctactcttgctgagctagttaaggccctggctagagatggcctgtgaggactttagccacctttgagtagagctgcggtgtcccctgcccctggcttcagccttccctgctcctttcactgtgctggccagcggggagaaggagaacaccacttgagcagatcagtggggccctggctgcagctgccccggccgcaggcctggctcctgtgcctctgagcctgggtccagatttcccatgtctctgccttttgtcctggagctgagctgagcatgtcaggggccggcggtcgcggcattgtgggcctccggctgaggccgccagccgtaagatggctgccaaggtctaaaatggctgccagcagcgcccggagcagcgcccggaggcgcgtggcaggggctgcactcgcaccggatccttgctcccacttgctcctttacacagagctaatagtaataacagcaataacgttttggggctgtgtcctgatttagaaggatttcctgtctgtcgcgctctcctggagccctatttgtctctgcctcagtcgctggcccacctccatctctttgtcgggttccctctcggctgtccctgggctgggtacgcgcatgcgcatccacacgcgtgtgcacgggcacatgacttgccatctccacttggtctttcgcagtgggtaggggccgctcccatggggtggactgtgaagcttcctccttcttcccctgattccactgatccagctctggagggcttggtggggaccaagttgtccctaggatgagtggggttcatagcagagagacccctgggcagcagagtggggaccacgtgaccctcgctgagctctgcacatgggtcctgaggttgtgcccttcctgagccatgatttagagcaaccacaggactggggtctgaggaggccctggggtgggctgcctgctccgtagacctcttggctgtcactcccggactggctggggctcaaatcagacccagaaacccagcaatgggccaaggtgaaagagtgaggtagtatcaagaaagttcacattcacaccatgctatggcacagagaggctgccctctcagggaacatgggtaggcttcctccagagcagagagtgccactaacaaagagatggctcagggtgggaacctcttttgccaaacacaccaccagggctgagcgaaaggggaggtatggaaggatacaccccaaaccagaggtggtgaagtatatccttccatattaaaagcacttgttagcactttccgtattaaaaagaactactttttcttgactcgctacaatagtatttattttttggaattaaaaaatcaaaagttaagtggggatggggtggaggggaagtggagcctgaaacagtcacccttttttacccattacactaaggcaggcagcctggagcatggccagtgctttcagccccagacatggtggggccctcatgctgcaagcaggggtgccacccgggtgggctgcatcctgccctccagccccagaacccagctctgttccttgcctcccaagtgactgatggggtccctcaccccaaccctagggctgatgtcaccttttgtgaacctcctttatggtgggggccagcaggttgaatcagggtggtggcgagacccaggaggcaggaatgctctttaaagtcgggcaaagccctggccaataccaaggcacgtttttcagatgccacccccatgtggtccccctgtgagcagctgattcttcaccaaatgcctggcttcctcctgccccacaacctgcctggcccccctccaccaccctctcgccagctgtcatgcccaggcaggcattctggaggtccccgttgtgcccctggcacacaaagctttgaggaccagggggaccagggtggggggctttcccaagctcagcaaaatattcacacacacactccaccctgcccccagccctctgtgagctcccactgcacaatgagcccttgtctcggggctccctctgagcagctgtggcaccggggcatgagacagcccagacaggctggcacagagcgggcgacagcgtcagggcagacctcccccctctgggttgccaggcactgcctctgagcataaaggtgaggtgggggaggcgcaggcagacaggaatggcttcaattaaccaagttagggaaggggatgctcctctgggagctggagctgggtgggggatgggggacccttgggtctgtccccgctgtggagagagatggtctctgacttctctcttgggacccctctttgctcctgactcttggccggtgcttcttacctgagggtgactttgcccttaagggcacagtggacaatgtcttgggacagtttgggttgtcacaactggggtgctactgtcatctagtgggtggaggccagggatgctgctcagataccccacagtgcacaggatggtccccaccagagagagcaatccaggccaaatgtcagcagtgctgaggctgagaaacctgcactgggcctgtctttccttctctgctttgggtctcccggagcctcctggggctggtttggggagagggtggggtgaaggtttctgtagccagggtgggccgtccctgctcttgcaccaggctggaggggccaatgcttggctggtgcttatggggaactttgctcctgatacattctccccttttgtgtctcctgcagaatccggacaatcagatagttcaaaccagcaaggagatgcggacatcaaaccactgcccaacggtcagtgccccccacctgcccagctgcccttatccttcatgcccctccacttccttcccccaccctggctgccctggccaccctcacttcttccccttcattcagctgtcccttgactgagcttagcttgctgtcctgaggggatgggggcacacctagaggatcccccctgttcggtgtagacctgagggctagcctggagctggaaacgggacttgggagggagaagcaacagtgtggaagacctttggaaatagccaggcagcccccttctggccttgtcttgactcactcatcctttcccctcttcagggcacttaagtttccaggactgttttgtgacttccggggtctggaatgtgacggagctggtgagagtatcacagagtaagtgagtccttccttccaggccagggatggggattgaaagtgaggaggtgggacctcatgggatgtcctcctaatggggtcttagggcaggtggatgggaacagatgctttctgggacactctcggcttcactggtgctgggctgggtacaatagagtcttccagagaggcctgtctccagtctccattgctttggaggaaaaagaaaaagtcacaaccaaaggctcttctgtgacccactagctgggaggaggttcctcagcagcccagatggcccactttctcccatctcctggccccacagtaaactcaccctgggcttctgggaagctgttcatgacaaagaaacagaccccatcaggcctccccccacctccaaacctcatcaccctctcgttcttcccagctcctgttgcaacagcatcagggcccaacttctccctggcggacctggagagtcccagctactacaacatcaaccaggtgaccctggggcggcggtccatcacctcccctccttccaccaggtaagcccagtggccctgcctttccatcttctctccactccccccagggccagggccgtcccagtggctatagtcagctgtgtcactgaggctagggtgcttcagaatgtcacctctctcattgagggcactggctctaacactttagagtccaccatgcgcagtcacccactgagctgctttgtgctgtcatgaaggacccagccctggggacacaaactcgcacaaggcatcgctttgcctggaagtgggagtccaagaaggtctctgtcttggggaggtgacatttgagcccagacacagagggggttgttggggggtatggggaaaatgttccaggagaagagggtagcctgtatcccagttcagcctgcacaggctggcggggcaccctgcagagggctttggaggccagaagaaggcatttagacttcatccctgggtagtggggacccctgaggggttttaagcaggggatgctgagggtgtgtgttccagaaagctctctccagcaacagtgtgtgtgggcgggactgatagccagttaggaggccattggaaaggctagagtgggggagggcctggagggtggggtggatggagagggagggagctgcttgggaggcagggatgtgggttctggccagggcaagttgtgctgggcagggtccactccactttttttttttttttaaaacgggtgtttatattaattgcgagatttttggcattcattttgattttttaaaaatatgggactaggccaggctcggtggctcacgcctgtaatcccagcactttgggaggccgagatgggcggatcacgaggtcaggagattgagaccatcctggctaacacggtgaaaccccatctctactaaaaaatacaaaaaattagccaggcgtggtggtgggcacctgtagtcccagctacttgggaggctgaggcaggagaaaggtgtgaacccaggaggcggagcttgcagtgagctgagatcacgccactgcactccagcctgggtgacagagcgagactccatctaaaaaaaaaaaaaaaaaaaaaggaactaaaatattctttatattgatgactgagttttatggcatttttgtccccctgacatttttgtccctctgacatttttgtccctgtgagtacgtcattcacctcaccctagccctgggggctgccaggaaatcataggtgggatacaggaggcagctgagggttttgccgacttctctgatgtgggcagcttggaggaccgtggcatcacagattgggaaggggcttgaggaagaggagcaggttgaagctgatggcttgaggggccctagggctgatcttggggttgggcacgcagtgagtgcccagaaatgctgctgtcggccggcaccactccccacccagagggccatctatgcacagttctttagcctggactcttggtcactccctggagcctcagcccatccttggcccatgtgaccctttctttcttccccagcaccaccaagcgccccaagtccatcgatgacagtgagatggagagccctgttgatgacgtgttctatcccgggacaggccgttccccagcagctggcagcagccagtccagcgggtggcccaacgatgtggatgcaggtatgggtgcgggggatcctgacccagagcaagggcagcccagagtctttttgtccccttctcagttcacctggtgagcctcccaccagttgtccccctgtcggggggcattacccatctgttttcttgcctcctgatcttccagggagggcagagcaggctgaaggaagggagtggaggtgagggtgaggaggggtgctgtgagagtcagcagcagagcccgtggtatggcggtgggaagcagagggggtgccaagcctctggtgccccacagtgggatggccgcagcccctcctggtatttctctagaggttgccccaccccgtggcctcatggttgaaagcagtttctcaccctgggggctcatcattctgtgtaggggattgttctgtgcatggcaggatgtttagcagcatccctggcctccacctacaagatgccagcagcaaaacccccacccccagttttgatgaccaaaaacgcctccagacattgtcagacgttccctagtgggatggaatcctcccaggatgagaaccactggtctcaagggcccagcttcacagagagaggctcagagtctagtgaagaatgagcagagtccttttgagaccaggtagggaagctagcgaaggggagagagtacagaggaagccagctcagaccttcccagtctcctctagggatcttcttcttgttgaacccaccccccttcacctccattcttgactgagggtgcagacagacctagagaggactctggaagacagcatgtaacacgtgcgtgtgtgtgtgtgcatgtgcatgagcacatgtgtgtgaggaggctggccgcaagagtcccccgctgacgtgccagtggtacagcccgtgtttatcctcactgtgggtgtgacagggcctgggagtgcagactcacgcgtgtgggttgtgcacagggcatggctgctctggacaggcctgggccctgggcatcattctcctcctccaaaaggtgagggtctgacctaatggtactttgtctgatgttttccagatatgcccctactgggaagggccaagtgggcaggcagagtctggggtggagcgaggtggggctgggaagcactcctgcttttctgctgccccagaacgaatgcaagttctggcagcttctcctcctcctgggaggaggaaaggagggctcgcctccaggcctcaggctgagggagtgggctggagaccctctagatggccagcagaggctggcctctgtgagaaggcttccttgcgtgactctggggcccctcccaggctctcctcgtggcaggcagggacttgggccagcatgggccacatgcttccctaggggagccttgagaggcagagagaggagttgagaaggcccgggagactcttgggctacatcctgggtccctggccggggcctcagtaggtgaccccttctgcaaggactgcccctggggtgcatagaggactgtgtctgcagctggctcctggggcaagggctcctgggctcctgtgcccagacctaattcctgaggagcccccctcttcctggctcctgctctctcctttcttggctgtctgcttttgcgcctgccatttctgcatttctgctccttccggcagtcctgccacgcacggcccctcaacatcctcctgcagcaccctccggctcccttttcccctcaccccgctgtgtgttgttttcatgggctgcaacaaattgccaattaagcagcccagctgcaggacagggaacagctggggaggcactgtgcggccatggggacagctgtgcacagctggtaggatgctcccccctccccactgtgccagctatcaggtggcacacagctgctgccagataacacctccgctggcggctgggagttcgcccttcccccgccccttccctctgcagttaagatggctctttatttctctgttctgcagcccctccacccctcacccaaactgacttgatttgtcctccaagggtggcagctgtgagatctgccccaactctaccttatccttcccagcctgggcacaaccttaaagctcagcccaagatgggagctgatctttccagaagaacctggccccctgggggccctgctttgtcatttggatgctatggccactgggcagagatgaatttctaaagacagacttcaaacaaggtgttctctgtgcccttgtttcatgctgaatgccacccacacctctggcaccagaagcagggcagagccctgaaattatccatcctatggcagctgagcttctgggtcccctggctgggggagtcttctcccctctggctctgcctgcacagcccggctaggcctgagcagcccaaggactctccaggtcctctggcctctgtccctgctctctcgctgggcattgtgtccctcctgagggctcatggctgtgtgctcccttccctaaacggggccctggcttcttcccaccagaacctcccatggccccgggcaccatggcatagaccccagcctgtccctcccaaacttaccccttcccggctctcaagctggcgccctggggttcctcctgcactcctttcccaatgttggtcctgcatcccaccctttcacttcattacctgcttgccagggcataggctggggcccttgctcaccccctgcctggcacacaccaccccacattacccaggggcctcgttttcctctctggttagaagcaccccttggctggcctacacacagggcctcggaaccaggcctagaacaaggcctgggactgggcaaggagcagcaggagggagcacagtggaggaaggggcagtggggaggggctgaggagagaaggagcgagctgctggcttcccgccttccccgcacccaccccagcccagctaaacctgccctgtgttgctgcttcctccccccaggcccggcttctctaaagaagtcaggaaagctggacttctgcagtgccctctcctctcagggcagctccccgcgcatggctttcacccaccacccgctgcctgtgcttgctggagtcagaccaggtgagaaatggggggccccggaggggggcagttggggaggtggctgagtatctaggggcagctggccaggtgaaggggccagagctgaccccgagtgacagccccacgctctccaagtgggccaaggtgcagcagcgggtgggcatgggagccggcccctgcttcacgtagcacctcatcgaggaccaggccgggcccctgggctgcccacctggctcctgagcaacctcccacttctcactcctcacgtgcatgggtgctacatacaacacaagcctgtcccgagtcctccccaactctggcccagttctccttttgtcctgccagctgtgagcgggaaggcacagccttctgctctgccttcctgccggctcctctctcccagctcctggctgagcccaggctctggatttttgccagcatgagcccaggttgatgtggggcctggatggagaagagtactcctaaggagcccaggctcctgcggcaagtagctaccttgtctgggcctccctgccgctttctagaaaggaagggctgggtctaggggacaggtggtacctgggctgctccccaggaaaaggaactgcccactgccgtggggctgctctctgacttcagtgtcccagttgagaaggtgctcaggatgagaacacctagatcgccctgaggagataggatcaggcaggaggctgtgggagctgagacctcagccctgtcactccttcactttcttcttccctctctgggcacccacctggcagcaagaggcctggactttttctggatatggccctatgtccgcctgccatctcctgggctcgtatgtaggacacagaaaatgaggaggtttacctcctggcttcctccttggggcctcctggctgggagcccagaggcagccggtgctggggcagggtgtggtggccgcgaggtgggggtggggagcccaggccctctacacaggcagcaggagggcgcaggcctggctcctccggctccacctcagcttttatgaactccagagagaagccaagtttcctcagccccctaatgaaaccgagagcaagagcgagctgattggaaacagacgggaggaggaagagctggggcctgctctgggttgggaattgcgtgtgcaaggacgcgtatgtgaggacacgtgtgtgagtgatgaggctgagcacatgagaacaccgcctaggtggcggtggctgggtgcacaccagctcgcactcaggagatgtgtgtgcatatgtcagacggccatcctgagcagatgctggctttgtcttcatccagagccccagggaaccctctgcctcctcttgtcccccacccagtctcccacccagggcctgaattaaggcagggctagtgaggcactcaccttaggtgcagagtgtcagcaagtatcaaaaactcagtcatcaagataaataatattttaatggaatatgttttaaaatccaaactattgcaaaaaaaagggtatggtaagcaaacaccagtttttttgtttgtttttctttttcttttttcaaagacagtttcctgctctattactcaggctgaatgcagtggcacgattatagctcactgaagccttgaactcccagactcaagtgatccctcctgtgtgccaccctggctaatttttaaatgtttgttgtagagacggggtcttgttatgtttcccaggctgacctccaactcctggatcaagtgatcctcccaccttggcctcccaaagcactgggattacaggtatgagccacagcactcagccatgtctttgtttaaaatggtttaaaatgttgaggctgggcacagtggctcatgcttgtaatccctgtactttgggaggccaaggcaggaagactgcttgaggccaggagttcgaggctgcagcgagctgtgatcatgccactgcactacagcctggatgacagggcgagatcctgtctctatttaacagatactggctgggcgcggtgtctcacgcctgtaatcccagcactttgggaggctgaggtgggcggatcacaaggtcaggagatcgagaccattctggctaacacggtgaaaccctgtctctactaaaaatacaaaaaattagccgggcgtggtggtgggcgcctgtagtcccagctactcgggaggctgaggcaggagaatggcgtgaacccgggaggcagagcttgcagtgagctgagatcgcaccactgcactccagcctgggtgagagagcgagactcagtctcaaaaaaaaaaattctttaggctgggcacagtggctcatgcctgtaatcccagcactttgggaggccaaggcaggcagatcacttgagcccaggagtttgagattaaccaggacaatatggcaaaatctcatctctagaaaaaaaaaaaagcaaaaatctaccaggcctggtggcgtgcacctgtagtgctggttacttggggggctgaggtgggaggattgcatgagcccaggaggattgcttgccgtgatccgtgtttgtgccactgcactccagtctggatgacagagcgagaccctgtctcaaataataataataacacttttttaaaaagccaaataaaataaagacaagatcctaccctgcctcatctgcctcatcctaatctcccagcgctggttgtgatcaaactttatttacaaaaacaaatggctggcctttggaccctagtttgcctatttgattattattattattattatttttgtattgcattaaaacatcatggatcctgatgactgacttttttgtgccgccttaacttttgtgcctgtggcggctgccttacctgctcaggatcctcaggaccctctgaccggcagctcccctcctctcctgtccctcccactggctgcctccttggccctgacgcccttttttccctgcccacgtgcatgcagggagcccccgggccacagcatcagccctgcacttcccctccacgtccatcatccagcagtcgagcccgtatttcacgcacccgaccatccgctaccaccaccaccacgggcaggactcactgaaggagtttgtgcagtttgtgtgctcggatggctcgggccaggccaccggacaggtgagtccagagggccccaggagcccggctacagcctcatctccacatctatctgtctgtctcagggctcacagggagagggcccaaaagccaggagcccacctggggctggagcagcagggagctggtagtaccaaacgcctcgattttctgggtctggggacgggggtctgtgtattatgccagggcttgtctatcatggtccggagaggtgggggcagcatctgggcccccttgctcagtcaggctccttgcctttcccatggtccttgccccctcagcaggagtgaactcatgatgatccaacccggatctgggccctgacctcccagcgctcctcttaaacctcggggctgcaaggatttgctagattctagaccagggtttccccagtatcagcactgttgacatttggggctgtttattcactattgtgtgagaccatccagtgctctgtaggatgttgagcaatatccctggcctccacctgctagatgccaggagcacctcctcctccccagtcttgataataaaaaaaagtctccagatttcagtgtgcccaggaggggaagaccatccctagtgaggagcactgtgtcaagggaaagccccgatccacatagctgccacggagactcctgctggcaggacttttaacaaagggttcccaggacggtcctggttctagagtgaaaccctgctgctcctcagccctgggagacacactggctccccccagagcccttctctgtcactgacagaaactcagggttgctcagcgaaagaatgatcccaggaggtggtgggccagagatgacccttcagtgggacaacggtccctggttggaatgtggaggtttctagacctctgggaaaaatccagagcctcagcagcatgctgtaataggagaagctctagctcctctgtagccagccctcccagcttggaagcctgctgcgagaggtcaggcagggaggatgctcaaagggctgtggtggggaaaggcatcccggaagcccacaccagaggctgcctgctgccaccagccccgtgctgccttggtgtgctctggcagagcgagcatttgctaagtgctggtgtattgatttgcggcggggccgtggctccgcctcctcactctgtccctaagggaagccagtcctcttccctccctcctgttcccctcctgctcctttcctcctcgtctcccttctccctttgcccatcgagggtttctcttggctgactctgcagctccttagcatactggtagcttcgcccacctctctctggacaagctctgtccacttttagggccatggagggaagagcagacctgacctctgacagctgctgtgcttgcatcagagatgccagcagagttcacggggagctaccagcctatgcccagcccccaaggggcctggggtctgggatatgccgcagagaggcctggaacattaccttacctgctttcttaactaccgaggcagccaggatttggagtcaaattcaggctggcctagagaccggccaaggttaggccaaggagccaaacctaaccacagaacccttgagaaagtgggtcatttagtcccctggccattctgagcctctggtcctgagggctgggtcctgagcctctcccttgacttgactgttcaagattgaggactctgatatagagccatagtttttaaaaaaacgacagaggactcattttgcctagaagcttctcttcctgaggcaggcacttgctccaagcagaccatggacaaaacaccgcaaacaggcaccttgattaagcaaggagtgtggcccagctggggagcaacttctgagtttccttgtgtggcctgtgtggcctgttgtactgaagagagggagagggggctcagcggggagcctgcttgatggagcccacgcccggcttctgggaggaggctagagacagcactgtgctacacaagaggctgatgcatagctgcagagagccagagggcccggctccgccactgatccagtgggtagggagtggcagcgcccagctgtgcttgcactacagccactgttaagcagtgcttctcagacttggcatgcgcgagagtcaactagagccctggctaacacacagatggctgtgcctcacccccagagcatctgatgcagcaggtctggggtggggactaagaattagcatttttcccaactttctaggtgatgctgatgctgtttctaacctccttgagaatcagaagtcacagatcagttttgcaggaaaatgtctgcatagaagaattttaggctgggcgtggtggctcacacctgtaatcctagcactttgggaggctgaggcaggcagatgattgcctgagctcaggagttcgagaccagcctgggcaacacggtaaaacccctctctactaaaatacaaaaaattagctggacgtggtggcgtgtgcctgtagtcccagctacttgggaggctgaggcagaagaatcgcttgaacccgggaggcagaggttgcagtgagccaagattgcgccactgcactccagtctgggcgacagagtgagactctgtgtacaaaacaaaaacaaaaacaaaaaaaacccagaattttatagacaattgcagaagggttcccagggcacacctatagccatggccttggaccctagggtaataacagccaaggccatgtggagacactatgcagaggagatgcaaagggcagttaagaggatgcctggttagctgtgtttcagggagaaggaagagactgccaagtgaacatgatggagaaatcacagggcccaatgggagagcatgactccgggaggcaggatgcctggtcctggctcagtcttaccatcattgtctgaacagccaggcccacgtgtttatctgtaaggtgaaagtgaggagctggtcgggcgcggtggcttatacctgtaatcccagcactttgggaggctgaggtgggcggatcatctgaggttgggagttcgagaccagcctgaccaacatggagaaaccccgtctctactaaaaatacaaaaattagccgggcatgatggtgggtgcctgtaatcccagctacttgggaggctgaggcaggagaatcgcttgaacccgggaggcggaggttgcagtgagccgagattgcgccactgcactccagcctgggcgacagagtgagactccatctcaaaaaaaaaaaaaaaaaaaaaattgaggagctataccaccttccaggctccttctagctcctaactcctgaggttttaaggcactgcacagtcacaagaccttgaggtttttaaaacctcaactgtaccccagtcagagctgagacatgccagcctggttggaagttacatctagaaactgaatgttgtaaatcagcaggtttcaatgtctggccatatcaggcggggattagcattattgggtgggattaacgatttagatactcctcggggagacaggctctgaagctggaggaaggcagaggccgtcctgtggttgcttggaaggcctctgtgtcccagtcccctgggagcctgagctcgggacacctggagaggaggagtgaggctgtgatcagaccgtcccattccctccttctaggcaggcatggagatgaggggaggcgtcgcatcacctttctctgcagcgctgcaaacccccacgctctgacctgcactgttacctggaactgagggtccctttccaaaacacctgcacaaaagttctccagcccttgacacatatggggaccagcagccactgtttgcttttgtcaagggccactgagagttgtcacccttggagtgggcaggaatgggtcaaaggaaccatttagagggacagtgtgtcagacctagatgctggtcatcgtggtaaaaaaacagtgggcagagaagccagagttcagaagggcgtggctgcacaggccagcctgggcttccgtgactttaaagtgcagcaggaaggacaagtcgatcccacgtgcttagtggtacttgagtgctgcatgcttctgccgacttgttggggagctggcagggatgggggagtggcctgttttgaaggttccagtgagatcaagaatgtcctagagaaacagggcagagaaagataggttgtgattcaggggatctggctggtccccacagaggggacagcgttttttgagcaggtcttgaagggtgtgggaaatagtctttcatacagagagcttcgcagcaagccagcgtgcagtcctgcctgctcggcctgtgttccggaaaccccagtcagtttggaatgggaagtgcagaggggcggtaggggctggaccagtagaggcatccgtgggggccttgaatgcccaactgaggagattggacttcatgttgggtatagctggggccgtggaaggtttcagaggactggagaaacctgagctgatgtggatttgggggagaggattgatgagcctggtggaaagaatcctagcatccctggagtagtcaggcagacatggctgtgaattccaggtctggccagttgcagctgggtgacttaggataaaccatttaatggcccagagcctcagtttcctcagttgtgaaataaagagaatagagcttcctttgtggcaaggcttcccagggcaggcctgttaatgcttggactgatgatcctttgttgttggggctgtcctgtgcaccgcaggatgtcgaggagcatcctggcctccacccagcccctccagcctctttgttgtgacaactgaaagtgtctccagacattgccagtgtctccttgagggggacagaattacccctgggtgagaactgatgctttctggggtgggtcaggggttacacaacagaactaaagcacctggtccagggctggacactgagggtcctgagctgataagcacagtctcagcacaggggagccccatacaccagctcattgtcatcgtccagctgaaatctgtgaggacagaacgaggcactggctggagacatcaaggggatgggctcctcagggcttgctcaccgataggaggaggagcacacagcatcctctctgggtctcgcatccgggtgcccggaagggcggaactctatcccacaggagaggtgctggtttaggatgaagagcgcaggccaggccttcctgagcccacgctgcagtggtcatcagggtcctgttcagagcagcaggaggtgtgtgcccaaacctccagggaggtctctccaaggaacctgcctgggagaggcaggggcgcctctgtctgtcctttggcacctgtgtgtcctgaagccagaaggccaacccacgcaaggccatgcacagggcctggaggagaaaatccagttagaagcaaatgagggcataaaggacaaggaatgcatcctggcagccgagcatccatggcgtctgagggcgttgtacagggaagtcctcctgaagaacctcacgggcactagagctggcagcgatggattttcttccctggccattcttgagagaacaggtcagcaccctaccacccacaggcagtgaggacccaggctgctggagccgaggacgagctccccaacttctggtggcctcctgaggacatgttgtggggtgggtgctggcaggcctgccgtccttggttaggtgaaccagctcagcccgacagccctcagagggaggcaggcatgtgctttggggagccgggggagcagggtgagcgcgctcatctttcctgctgtaggagatggtcttcaggagtgtgagagttctaggtacagctgcacgtatttgctaggtggcacattttggtacctaaaacattttccctaagaagtaacaaaccacccgtcgaacaccccctccctccctcccacaacttcaaaagaggaccaaaaaaaaaaaaaaaaaaaaaaaagagaaacacctgagagaccaaatagaggccttacaccctcacccatcctgtgccctggaggagaggacccaatcctggatcttccaccgggagcgcccgctctcaggagcgagctggcgcggccgcgcaggggagcgtgtgtctgtgtgtgatgtgccttcatgcgtcactctatttatgttgttcgcagcccaacggtagcggccagggcaaagtcccggggtcatttttgctaccgccgccgcctccagtggccagacctgtgccccttcctatgcctgattccaaatccaccagcactgccccagacggcgccgccttgactcctccatcaccttgtaagtggacgatgaaaccgaaaccacaacgcccagcgtccccggcccgtccaaacagtctccactgcaaaaagaaaagccttccccctccccaccaccaaagccccccaacccagagcaccatggacaagagcagagccgagccccccaaccacagcctccctcccgggcctcagtcgcaccagccagcaccccacgagccccctgcccgctgctcccagccggggcccctggcccaggcccctctggggggcgggagggagagcacagctggggcgcgcaggccaggggtgctggcgggggtgggagggggcggggaggcacagccatgccatcttcatgcctgattgctgtttttttttttttgttttttgtttttgttttttaatttttttgttgtttcgttgttccccccacaccaagaaaatcaaatgtaaccacaaggcgacgccaccaccatcccctttttgccttgcccctcacctccatccctgggcccttgggcctcaaagacgcagcaggccagcccgaccccttccccctcagtctcacatttggtttctcgttgttcctctttttttttcccccccttccatccctctcccgtcccttctccgcaattcctttcccaggttagatgttccaaggacgagggagggctgtgggctttggcttacttcatctctctctctgtctctctttcttttcttttcttttctttttttttcctcttaaaccaatgacaaattttgtcaaagggaaaagaagaaaaatcattcgagaggtcccaggtagacccggcgtgaaggacaggaggatggggcgggtgctgtctgtgggccagggtgggcagctctgggggtgggcaggccacaggccagggcagttcggtggcggtgggaggggtggcccatctcacactgctctccgctcgctttgtctctcctcctttctcgtggtttgagttcttttcccctctccatcctcttcatgccatcttcccatctgcatccaccataagacatgaagtcacagtcattggaggtgggcagggtgggggatgggagctgggctacagggttcgggggccacttctggagagaggtgggcagaatctggtgagcatggagtccctgggtgtgtctggtgcagggcagcggcgggccttccaggtaacctgtgacactccttgcctcctctgggggcatcttcccttctgggggtgcagggcctgttccctccagcagggctccatctggacaacctgagaggaactcagggctgttgagatcattttgtctttgggccccaggatggctgctcccaggcatctgagccctagggctctgccaggctctccagcctcctcctcctctattgccttggtcctggaaccacaggcctgttggacctggtgcatcagtcagaggaggagaatgccataggcctgagccttgccaccccctgggcccaagccaggcagccagctcctaggcccttctctgaccctgccctacctggctcagacctccattgggcaccctttgggttccccaagcctgcctgcctggtccttgggcctgcccagagtggtaagaggtgtagcatctagctaggccacccaggttggagaggtagcctggctgggaaggccttcccgaagcagggtggggccggactgccaaagcctccaccctcccctggccccctctcttcagtacctgagaggggccagtgggaaagcagggttatccactgagggtacctggggaccagggctatccccagccctgcccagtgcctcactagcgggtggaactgggtccaggagacttgtctcagcctccagggcctctccctcatcccagctgtgaaaaaggatgcctggctgagactgtggcttctgagtgggtgtgtgtcgggggtgtagtgtgtgttcctggtcagtgagaggatgagggtgtccctctgtagtggggggcaggctcggagcctggccttcagctcagatgcccctctggcccatccttcccactgccagcctaaactcgggcagcatggtctaactcagtctctccctctctcagcagccccgaggggcagtgcccaggtgggccccaaggcctgacagggtctctccctctctcccctgctccccacagcattcgcaacgacaggcgcctcctctgccaaccggtttgtcagcatcggaccccgggacggcaactttctgaacatcccacagcagtctcaggtaggagaccctgcccaccacctggatgcagggaccaggggagtagtcagggttggggggcatcttggtgttagggaagagcctggagtccttggggctaacagggagagagaggtctgaggtggggctggagggcccaggcttttgcacgcccagctgagcctgtctccccaggcagcccccaggctccctggctaatcagctaattggataattagctctgacagccctggccctggggaaggcggccaaggacccaagtctagaggccctctgggccaggcctggtagaagcaaagatggaagcctgaggcccatcgggaggagaatagagtctgcctcactgctttcacctgccccgactggaagccccggcccctagccctcccctttcccctggcgttgggtgggctgggtgacgggtggaggagggacagagggcctggtgggctgcgtgcccagaactggcactgagggcagggcagggcaggccgccaccctagaggcccctcacccaagtctccaggagtcctgttagggagaaggccagcatgctggagacctcatccttgctcctatcccctgctgacaccacccttagttctcaccaggagacagatccccgtcacaagcagggcataagactactcttagccctccaggtggagaccccagaggccagtgcccacagagcccagtgcccttgggggcacagggaagacccatctcaggaggaggacagaggcagctttagggggcctgaggcttttaccacccagggttttgaaaaagaacatgcaaagatctttcttttgcacattttacaaaaacaccaccttggaggtgtcctcagcccggggaaatccacctctctcaagagcccctggggccacctctcatctcctgctctgcctctgttctggggcctgagtccagagaaagttggtggatggaagttgtgtgtgtggtttgagattgtttttttttttttcttttcctttccttccctcaaaaaaaaaaaaaaaaaaaagccaaaaaactttgtcaaacttcaaacttcagagctccctagtggcaaggaggggaggggaagagaacttcaaccccctccagcttcccaccccctttccccagagtcacgtctgacccgtctggtttccaggagcaaccagacatgatgtaacacccagatgaacttgaacttgggggtgctgagaagaaaaacaatggctccgagcaggggctggagccagccccctctgctctgtgccagggaggccgagagagccctgctggcagaggcgggagggggtgcgagaggaagggacagcaggcgggcctcccctcccagctctgggctggcaccaggcttcagggttccatcgctccctccctcctgctgcctgcctgggctgctcacagctctgcggtcgtgcgctccgaggaccactgccacgagccgtccctgctaaccctgtttccgctgcctcctttactttctttgctcactttgcttggacgtttgggggccaagtcagagtttagggaaagtttgtctccccccatgttccctgtgtcttaggctccaggaggtaggaggaaggagtcccagcgggggtccagggcccctgagcaggcaggtgtgtctgggagtggttgggggagcggaagctggacaagcggagctggagccctcgggcctgggggcaggcaggcggctgcaacgggcgggcgcagggggtacagccgggggtggtttccacagtaaccagtgactttagctgatctctggagcaccagatggagagagaacaatagaatgagggaagaaaagagaattttagcaattttgtcattccctgggcagcgctttttacttagttttaatcaattttggacctggctcaggaagtagggaggggtgagcagagaaagccactctgtgcttggcagcagatcccccatttctgggacctgtggggaggtgccggggagcccccttggggcagcctttgtccctaactccagacctggaaccagagtcttccttccctgaggaggaccccccagtctgagcattggcagttgtccccaactgtacagctcaggagaccccaaaggggccagtgtgaggccctggcatgatctgccaggagcagatagggcaggtggggccctccctgtcctattgtccacaagcctcatttgcctggtgaggagaggggtgggcttaccaccagagtcagcctccccctcaacctcggggcaatggcacagggttcctgtatagtctccccttgggaagggggtcccagggaacaggcccaagcctgtggcaggtgggggtcacccagcccaggcgcttcccacccccgggcctgggccagaagcccaggagctggctgcgggccggttctcccccacccactctggggatgcctcaggcctgggtttccgccttagcctcgccaggccccaatgagcctctgtttggcctgtagtcaattgaccggttggacttggggcaggtgctcgaggagccccactgagggagggcaggtctcttgtgcgtactgtccagcacatacaggaaatttagcatttctgcccacccagcagcgcctgctcattgtggcaatcccaaaccgccacatttccagatgctcttgatctgcactgtccattgtggtagccacgggccacgtgtggctgtttacatttaaattattaactaaagaaaaatttagttcctcagttacagtagccacatttcaagtgcttagaaaccacttgtggctagtggctactgcaatggaaatgagaacatttccattgtcacagaaagtgctagatgatctccaaggccctttctgaaactcagtgtccctatcctcagtcccaaaccagagcctgagagcaggtctggcctgcaggcagaatgtttgaccaaagcaatgttttaaatattggaaattttcacacgaaattctgtttgggcttctggcttcttttgaaaagttggcagatgagctgccctgggccctcaccctgaccctaggcagggcacaggcattctggccaccacagaccctgcttcctcgtgctcgcagcacaggcagcagttaggagcacagcctgcactgccccttacatttgaaccctggctctgttgcccgagggctgtgtggcctcaggcaggtcacgtaccccctctgtgcctagcttcctggtggggtcagggcaggggtggagtgaaccaggacctggtatgtgctctgtagttggctccgcctggcccctgcagaccagagtctgtgacagcctgggagaggtcccaagatgcattttcagggaccctcattttgccccaacggtactaccaggtgcacccaggcccagtagaccacagtagaccctgacccaccactttgccaggaggtggggctggagccttggatggagggcgtagccaagcagcccagacccttggggtctgccctgggtgtgctctgagctgagccaccagacacaggcagacaagacaaggccctgtctgtgggaaggcagcgccccctgctggcgatatgaaggaaatgacgctcaccccagggagcctcaagtccttcctcaatgtctggtgccctgagggtagaggatccagcaccatgggctacgtggcccctcccccaggcctggcgctactagggactgaagctgtgtggttcccctgcccccagtctttcagcctgtgggaccttggctggggtatatagatgggaatttctgcttttaatccaaagagacagaaagaaaactcagcaagaagctgggccacccccaacccattcctaaaacccctctgggtacaaaagccccagcctggcatcttccccaccctccaggacccacacaaaaacctaaacaattggaaacatggccagatctcaggcctgtgccagcgccagccatgggggtcccacccgctgggcacagtgcccacgggaaggccagctggactctagcactaggggcagagtctctgagggggcggggttctcgcaggagggagggagagaatggggatgccctttcttctccatgggaacaaggtgggtggtggctgcccggcaccctggctctttgggagctggacccttgaggggccaggtcactgggccaggtaggagtgagatgggacctgccccagctgttctcagtatcgcctctttttcatcctgtttcagtcctggttcctctgataagatcgacaaaagaaacaacaaaatgagaagaagaggttcctcgaaaggggggagaagaaattttgagaatggaaaaatcccccagcccagcccagccccaccgaaaagcaaaaattacacgtcgtcagccactcagcccttctctcctccagcccggggacccccgcgggccccagaagcagcccagttctcagagagcccttggaaggggtctcggtggagctgtgcaccagcagccaagcagaaagaaacacgcgacatggactctgtcaagtagaggacagaaagcaagaaaggatgcagaactgccttcctccccctgaccccgccccggccttctggggaaggaacaaagtccccaaacaaagcaaccagcacaattctgaaggggcctggcctccaccctcaccccttcctaggggaaccccaccctccacacagccggagctgccctagggagcctggagggccagcttgtaaagatgatggggtttagatccctcaggctctcccctccagactccgcccttccctccctccctccctccctccctctctgccaaggctccagcttcttcccccagctgctcccgaccaggagggggagagcagcctccacttaccccaccccacccttgggctaaaagcccccaggcgggcagggggtgacccctggagctagttgcgtgtcccagaatggagggtgttctgacaccccaccctgagccgcaagagcagtcctggggccctggacccctctgtacagtccgtaggaaaaagtcggaatgctctcgacggcctcgtcccagcctgggacaggccccctttcccctctctctgcaggccaggagggcctccttcctgccacgagggaggggagtcgggccccaggtcgcccccgcccccagccctgcatgcaggtgccctcgctccgccccatcagttcctgcccctgcccctcatgcagactgccctgctggggccgggccggagggtggagcagaaaggggaccccggagccgagcgaggaggaccaggcagccgccgctgccgcgctaagccaccacctgcgcttaggtaggcgtcctgctcgccgactttcagttccttgggagggtgttgggtgtcgtccttttcaaaagtgttttggagctttctgtgccccccgactttcccccgcctccccgccccccacgtggccacttttctctggattttagctgtaatgtctttactctttatttaggggtggggcattcattgtttgggtcttttgctgttggaatgggaactcctcctccatttgagcaacttgggaacaatttggtaacacaccacaggaagtagctctcccccccagccccctcctccctcaagggagggttggggggcctgtccagagggtcttcagaagcccccctgggagggaggggaggatgagcacgcccagctcccctccagggtgtgacttggcccctctggcttgtctttctgtgccttactcctcctcctgcgtctcccgttcctggccccttcttgagtccttgtgcctctctctttctctctctttcttaattgtatgaaaacacaaagcacaggtcaggatcctctgagagaaaatcaacattgcaccacgtaggggtgggctatgggctgtatttattgtgaatctagtttgtgaggctgtggccccgagctggcggagggagggaagaggagggagtgacgggaggggaggaggtcagcgacctggggccgtagcggcaggcgaacggtgcctgctacccagctggaagccacaaggtggctggctccaggggcggcttttgttggaagttgagtgaagccctccccctgtcctcagcgtgcagccctagaggaccccagggctgaggggcagtggatcctgcgggagtctcccggggcgtggggagtaaggccccgggggtggggggccgggtgggccgggcgtgacgcgcggtcaaagtgcaatgatttttcagttcggttggctaaacagggtcagagctgagagcgaagcagaaggggctccctgtccggcccacgtgccctttccctcgacgacagtcgagggctcgggctctgtgggactgtgggagctagggtctgcggggcgcctgcccgggcgaggtcggaagctgcaggccagctgggcccgggccggagcgtgcccggcggggctgcccgggcgggcagggggtgggggctgctcctttcccaagtggtgttgtgaggggcaatgagggcaacaggagatgtggggacgtgttaggagagaaaaaaaaaaaaacaaaaatatatatgggggaaattaacttttttttttcattgaaccaagtgcaatgcatcagagagttttcctatctttgtatgttaagagattaagaaaaaaaaattctatttttgttgtaatgtcctcgcggctctggggacgctaaaagaaccgggcctgccccgccctgcgcggggataacgaaagctgagtgtttttcccttttttttgttcgtttttagtttttttttttttaagtcgttttcctgcgttgacgaggatgatctggggtttttatttgtttcgtcgttcgttctgtttcggtgggagggctgaaggaaacgttcacattttagagtttaaaaaaaacacctcgacatttaaaaaatcaaccaacacaagatcaaaaaggaaaaggacgagagaaaaattatttttaagataattaaacataaaaccctggtgcttcttacattataaagtacgttttaaagaacccacaaactattatacataagtttatgaatcaattaaatatcctgcacttgttaggaatacgcatatcccttctttgttgagtttaacggaacgggacagcggcgtgcccccggcggctggactgctccggccgcgggtctccccgggcgcccctccctggggcccagcacccctcctcgccccatccccgtccgggtacgggggcgcggcaggggtccccggcccctcccccgcagaggtcaatgccaacgaacaaacgtcccctccctccctccctctccgccccgagcgcccttctttgagccagacgccaacttgaccctcaccagcattatcaggagcgcgctcagcaagttggtagtttcctcccccctttcccggcgcccctcccgcccccattcaacatctctcatcctatccccgaccccctccggggaacaccgggaaggctcgacgctccaggacaggaccagccacgctgacaggtcgatttgcccaggcccgcgcccgcacgcacgcacgcacacggccccgcacacagccccgccccaccccgcaaccagccctgtcgactgccttatacacccgcccccgcgctggccggccgacctagtgccttgttctcacccccgtgctggcggagcggacgccgcgctctgggtcccagaggggccgggtggctcagacgacccaccactcccccaccctgaccgtgctgaacagacccccccacacgagagaaaataaaggagcaataaagtcacgagaactttcgtcccccaatcgagagcccgaggggcaccccagccccgcctctgctcccccccaccccacccaccctcggggcgcccccctccccccgcaagccagcctgggccagccccgcttcggcccctcccgggagatccgtgcgcccgaccagcaccagcatcgcggaccgcaaaggccgcccgtcccgtcaaacaagtttcttcttaggctaagaaacgcagtatatacgagtatctctatatatagtactaatggatttggtgtgcttcccccttagcgtccccctccctctgctcctcctccttcagcctggtctccccctcttctctgccctccacccccgtctctgcactgagatacataagaaacaagggtagtttactgtctgttttgttttctgggttttcagtgtcctagcggaatgcaagtaggcagccagcccgtctgttccctctccgccccgccccgccccgcccccgtcactgcgcttctgttataccatctttgcctgactctctccggcttctccattgaatggctaatgtgtatgtgaaataaagaaataaagaaaaacaaacgcgagagcgcctgacccttcgctaacgcgaccgtgcgggactgggtcggggtcggtagggtgcgtccccgacttggattctgcgcctctgtccaagcgccgggagcgcagcagacgccgtcgacgagcgtctgcccctgggtctcccggaggggccgacggtgagaaaagcgaagcctccccagcccctcctggcctccccccgcgaccccagcccggaaaaaatgaggcaccacttgggtcctatgactgctctgccatgttgctttgccgacctcgcccctgggaaggggaccgggcaaggccacttccagagggttgtgggtgatttttttaagggtctgcgggtcccttgggggtcgatgatcacccttccggacccccgagaccttgcccctgacgtcttcactggtccttcttcgggggagttcgctcccgaacatgcgcagcacgtccactgccctttccttgacggccctgggccgagtccctggtgccctccggctcagaggtgctgccgcgtgcggtcaccgcacctctgggctcaaagcggtttgctccatcttgatgggccgggccgctccaccggggctgccgtcggggtcggccgggggcgcgggctgcgagcgcgctgccgcctcggccctgcgtccggatccccggcgggcgccgtcgtctgggacccggtgcaccggccgtttgcgaggcccgggaggggtggggcctgcggccagagctgcggcttggtcgcgcagcagccgcaccaggaagccgatgtacttcatggctaggcggagcacctcgttcttgctcagcttccggtcgggcgggtgcgtcggcagcagcttcctcagctcggcgaaggcgccgttaacgttctgctgccgccagcgctcccggctgttggtgaacacgcgccgggccaccttctggggctggtgccctgtggacaaggagggccgggttggtgccatggcccaaagggcggcccctcctgccctcccgctagacacgcagcaccctcgtgggaacttaaacccaggccatgggctggggctttctccacccaaggggtccacgggcagctctccccacccctcccaagagccatccagacaagaatcatcacaggcccggcctacggacaagggcctgctgtatctgtgactatgggcacctttatgtcaatgactgagattccctaaagaaagatttccttgtgtttgtttggtctgggaagctgtccgtggggccctcattctgattgtgcccaagtacggctggctgggtgtactcatgggtctgagaggtcctctcattatgactgtctgtgtcctgtgtcttgtatgactgtgtgagactcttgttatgtctcatggctgtggttatgtgtgatgttgccatgtggctgtttcacgagtggctgtggttgtgtggctgactcttgtgtggccgtggtcctaagtggctgtggtcctgtggctgtcttgtgtgtggttgtggtcctgtggctgtctcttgcatggctgtggtcttgtggctgtcttgcgtggctgcacattccagtggagctgtcattttgtggctcccatgccctggtgtggcatgctctgttttgccgtgactgcggctacatggcttggcctgttgggtggcggtggttgtgtggggctggctatgggactgcgattttgcacatgggtagaacctatgtgggctgttctctgtgtgtgctggaagcacgtctccccgaggtggagtagaggacagacatgagccccacacagagacggccaggccttctgtgcacccacaagtgcacatacaggcatacaaacccacaaggcacacaaacccacactcaccctcagccaggtccagctcacagtggcttggtctccgcttcaaccggctgctagggaagatgctaaaaggtcctgctggcccaatgtagacactgtaaggggtcgtgggtcactaatgccttgtgggcaaggaccctggcccccaatccccactgccccccaccccagatccccactgacctgttgaggaaggggtgagggtggtagtgcagggccaaagtgggcggggcagttcccagggtggagagttgcagcagcgggggccgcagagtgcccagctctgtggtgggcatggctacccctgggggcctgctgtggcccaggctgatcactggtacaccaggtggcagcctggggggcgaggagcctcctcggtggcccacctcctccacctgcgggggcccaggcgaggcaggcttagggggtggggcaggcgctgggctgggggcacacaccatctctgccttctcagtcatggtggggcccacctctgcctgtgcctgaggcgggcacatggaccccgacgtgggggtactcacctgtgggaaagaaggcagccagtggggaggaggactaggtgccccgctcccacctgcttagctcaagaaacccctcaaatgggaaggagggagggggagggggaaaggaggaggagagaagtttcagtaggcaaaggcagatggcgggggcaggcccagaaacttccaggacacgggaggggggtcctacgttagagtaggaggcgccccccaggtgctaggcagcgcactgtccctgagctctttgtgacccaggaggggcgctgttgcccagcctctgagcaaatattccttcttccagaattccctcacctctgcagcctggagagggaacaagacagggagcccctaactgatcctgggatccccagaaaccccaagattaaccctgttatcctcagatctaaagatccaacccagagactcctcattaactcattgatgccatgtgagcttggaatccctccaagatggactctgacccttcacggaaggcccccagcccccacccaggctgaccctctgcacctcaagaatgaccctgcggttcttcccattgctgtccctgaaagtgctccataattgcttgagtgacccccactcccactgcaaacatcccccatagcaaccctgtgaccccactactgacactatgacctcaaatgctgaccctagacccccaaacactgaccccactgcccagtccagtccagtcatgccccaaccctccctctggcttggaagcccccatcctcatcagcatccacgctttttaaaatttgtttatttttttagagacagggtctccctctgttgtccaggctggagtgcagtggtgcaatcatagtgcactgcagcctcaaattcctgggctcgagccatcctcctgtctcagcctcctgagtagctgagagtacaggcatgtgccaccatgcccggctaatttaaaaaaaaaaattttttttgtagaggcaggttctcactctgttgtccagggtggtctggaactcctgggctcaagtgatcctcctgcctcagcctcccaaagtgctgggattacaggcatgcaccacaatgccccgcgatcatccacagttttgcatactgttttgacatccctgtttgctcttggttccagagtccaggatgtcccagcaaggtgtgagactgttggcccctctgccctgtcttcctcagctaggccctggggaagcaggcctggcccctcactagtgggtccctgctggtgaatgaatgaatgaaggaatgaacaaaggaatgcaggctgggtcccaggcccgggatcctccacctttaggcccgctcccctcttaccccagcactgttcttgcagcctggtgagtgccctggctctgtcccgtcagggctggcagtctgggccagggtgtggtttccagcgtcaggccaggctctgctgtctcgcgagggtccggcctcaatgctccaggccccggcgttgggccgcgcctcctcgtgggcctcggaaggccaggatagccgaggtctccgcgtaggtcccccccagggaaagtgagcggctcccgggccggcccgccttctccccgcccccggcggcccggtttcctccctctcacccctggcggcgcagcggccggaggatgctggcccagtgcagataagggccaggctgcctggccgcgcctgataaggagcctggctgaccccggaggaaaccagcgggcggggacctagcagcgcgggcctcccggccccgcccccagccggcgctggcaggactcggtccgccacccctcagggcttcgccttccgctcccccagccactgtagggaccccgggcctctggggacccgggccccagggcagccggggagggaggtgcctggatgcacgcagggggtaaactgaggcagggaagctgcctcctcttatgtccgagtctgccctttggctttgcacactccctgcccgaatgtctgtgctgatgggggtgagggagagccctttccggcccgttggggccgcgtgaccctgggcccccacctcctctcctcacccagcctggttcctctttttacagaggcccttccctcctctccaccacccctacccgggagtggggcacccaaaggggaacagttctaacagtctggccttgggtgtccagcctgggcaggtgtcccaagccctcagcacagtatccacacatttccaagcccaggagggtgagaggaagagccatggctgtcaggggtggggtggggaagttggatttcctagggtgctggggctggtgtgaccttccagtagatgcccaacaggtccccacaactataggcctcttggctacaggatcacataactccaacttggtggtccatggccctcaccccacagcacccggccccttcatggggggcagttatcctggcttggtggtaaacctcaagaccctactggagcctcccacagggagaggctctgggcacagccaggcagcagcagctaccagactgccacccacttgtgatactcatgctttggcccgtctgtgtatctgggcaactgcaagagcccccaggcaggcaggcacccagcagcaggactaccaacccccccccccccccgcccaggaatggggtggagcccaggaccccacgatcaacacctccattgctttcctccaaagaagcaggaactaaagttttatgcagtaaaggccgggcttggtggctcatgcctgtcatcccagcactttgggaggctgaggctggcggattgcttgggctcatgagtttgagaccagcctgggaaacatggcaaaaccccatctctacaaaaaatacaaaaattagctggttgtggtggtgcgtgcctgtagtccctgctactctggaggctgaggtgggaggatggcgtgagcctgggaggtggaggctgcagtgagccaatattgcgccactgcactccagcctgggccacacacctagaccttgcctcaaaaaaaaaaaaaaaaaaaaaaaaattaagcgctaactctgatatcgctacaaggagggtcctaagattagcctcattacagatggggatgaagggagcaggagccagagaggggatcctgccccaggactcttcgttaacgttactaaaccccactctggagggcagggaggggtacagctccccctcactgggtgtctgggcagcagcctgcgaggtccctctttgtgtgcacgcccccctcgccccgggcctcagggcaggaagcacctggtctggagcggatgcacagggcgcctggttccggtccagcttccgccactgtggcccctggagagctgggccaaagaaaccaggcggcgaggaggcagcggcgcgaagacacgtgggggctaccgggcaggagcgccccactatgcgcaagcccgtggcctggagagcgctgaaggtgggagggggaagaggggcagaacccccgcgggagcgagcgcacagctgccgccccgtggccgcttcgggaatcgctggctccggctctggggtggctcagtgaccctcgctgcagaggggccgaccactgtgcagatggtcagctcctacctcccatacagactcaacactccagccaggcaggggcgaacgatccccagaggaacagatcccagtcatgcagctgtatggaccaatacacaaaccacaggcaatcgggagaaggtgacgtgacatctctttattggttcagtctatgcctggcccagcggcagccccaggtccagggggggtctggttggaggtctctggacagtcaggggcagcatcagcagaaaccctgggtgtcggggggctgtgggagtagcagcactggtccccgcgttgacaggtgccctggtgggaagatggtgggtgtgaacccctgcccggagctcagcagcccctgatgggatcctttcctgggatgggaagcccactcccaaacacttgcctggccccagctcccccaattctctccctgttgcccaaaggggagactcatgtgtcctgcagtggaggaaagggaggagggacctcacctccttaaacctcttgcaaggaaatgtcttgagccgggcagcccgctgggccacatcttccggcggctccttccgcttgttctgaagcagcctgcgtctctcctccatagcttcgtcggccgccttgcccctgtgcgaggggaggagtaggtgggaccccatctgccctttaccccttctttccctggctgagccccacccccaccttaccaccactcaccctggccgggcacgaggccggggaccccagttggcctccgggttagcctggaagcgcttgagtcctcgctgtcgggagctggggttggcatcttcccggatggtgaagttggcctgcagcctagggaagcaggggtggggcgttggggctgggggaagctgccacacgagtgtgtccccactccccacagggcctgtccgcctccacaacacagcacgaggtgtctgctcatgtcaggattctctcattcatctaataaacatttttggtttttttaaagagatggggtctcggccaggcacggtggctcatgcctgtaaatcccagcattttgggaggctgaggcgggtggatcacctgaggtcaggagttcgagaccagcctggccaacatggtgaaaccccatctccactaaaaatacaaaaattagccaggcgtggtgccgggtgcctgtgataccagctactcgggacgctgaggcaggagaatcgcttgaacctgggaggcggaggttgcagtgagctgaaatcgcaccactgcactccagcctgggcaagagagtgagcctctgtctaaaaaaaaataaaataaagatacagggtctcactctgctgcccaggctggagtgcagtggtgcgatcgccatcaaagctgcagtctggaactcctgggcttgagcaaccctcctgcctccgcctcaagctcctgagtagctgggacgacaggcaggtaccaccatgcccagctaatttttttagttttctggtagagatggagtcttaattactgtgttgcccaggctggtttcattcctgggctcaagcgatcttcccgccttggcccccaaagcactgggattataggaatgagccaccatgcctggccttaataaacatttttatttaacgactgtgtgcctgcattgttctcagtgctgggaatagacagtgaacaaaatggacaaaaagttacccctggtatgctggtaatgctaattttcttttcttttgggatggagtctcactctgtcgcccaggctggagtgcagtggtgcgatctcggctcactacaaactctgcctcaggttcaagcgattcacctgcctcagcctcccgagtagctgggactacaggcatgtgccaccacacctggctaattttttttttttttttgtatttttagtagagacagggtttcgtcatgttggccaggctggtcttgaactcctgacctcaggtgatctgcctgtcttggcctcccaaagtgctgggattacaggtgtgagccactacgcccagcccagtcagcagatttagttatttttatttttatttatttatttatttatttatttgagacggagtcttactctgtcacccaggctggagtgcagtggcgctatctcggctcactgcaagctctgccccccggggttcacgccattctcctgtctcagcctcccgagtagctgggactacaggcacctgccaccacgcccggctaatttttttttttttttttttgtatttttagtagagacagggtttcactgtgttagccaggatggtctcaatctcctgatctcgtgatccgcctgcctcggcctcccaaagtgctgggactacaggcatgagccaccgcacccagctatttttttattctttttgagatggagtctcgctctgtcgcccaggctggagtgcaatggcgcgatctagactcaccgcaacctctgcctcccaggttcaagcgattctcctgtctcagcctcctgagtagctgggattacaggcacccaccaccacaccatgcccagctaatttttgtatttttagtagagatggggttccaccatgttggccaggctggtcttgaactcctgacctcaggtgatccacctgcctcagcctcccaaagtgctgggattacaggcgtgagccacctacccagccccagtcagcagattttgaatctcacttgaagaatgggcacgagtctgtgtggggcagcatctgtgttgtctgcacacacatgtgcttccatgtctgtgggcagccctggccgctcctgcatgtgcttgcccctacctgggctccacactgagaatgcggaacgctgggctagtctctgatagtcgctcccgtttcaccggacattccttctcctgggggcagaggtcagaggttagggaatactaggcccaagggacctccaggtgaccaccacctgccctcccacctgcatgaggtcagccctgccctcacccagcaacgcatgatgtcccagagggcagaggcaggggcatccgtcttcacagcgttcttacaggcgtgggagagtgagacccggaagtcagcgtggaggagggccgacctggggaacagcagggattatgagggagatgccggactccttgaccccaaagcccaagctgaccagcgtaggtaagactaccttcggcaagggctcatggctacagagttcatttcttttcttttctttttttttttttttttttttttgagatggagtctcgctctgtcgctcaggctggagtgcaatggcgcaatcttggctcaccacagcctccgcctcctgggtttaagcgattctcctgcctcagcctcccgaatagctgggactataggcatgtgccaccacgcccagctaatttttgtatttttagtagagacagggtttcaccatgttggccaggatggtctcgatctcttaaccttgtgatccgcccgcctcagcctcccaaagtgctgggattacaggagtgagccaccgtgcctggccttcttatttattatttttttgaggtggagtctcactctgtcgctcaggctggtgtgcaatgatgcaatcttggctcactgcagcctctgcctctcaggttcaaccaattctcctgtctcagcctcctgagtagctgagattacagggatgtgccatgacgcctggctaatattttggtatttttagtagagatggggtttcgccacgttgaccgggctggtctcgaactcctggcctcaagtgattcgcccgcctcagcctcccaaagtgctgggattacaggcatgagccaccacacctggcctttttctttttctaattattattattatattttaaatggagtctcgctctgttgcccaggttgatgtgcagtggcgcaatcttggctcaccaccgcctcctcctcctcccaggttccagtgattctcgtgcctcagcctcccaagtagctgggactacaggcatgtgccaccacacccagctaatttttgtatttttagtagagacagggtttaaccattttgaccacgctggtcttgaactcctgacctcaagtgatctgcccacctcagcctcccaaagtgctgggaatataggcatgagccaataagcctggcctaattttttttttttttttttttttttaaagagacagggtctcattttgtcacccaggctggagtggcatgatcatagctcactttagcatcaaactcctggcccaaatgatcctcccacctcagcctcctgagtagttaggactataggcatgtatcaccatgccaggctaatgggtgtgtgtgtgtgtgtgtgtgtgtatacatacgtatgtatgtgtgtgtatatgtatgtgtgtgtacatatatatttatttatttatttgttagagatagggtcttactacgttgcccaggttggcctcaagtgatcttcctgcctcagcctcccaaggtactgggattacaggaatgagacagtgcaccgggttctccccaccccctcgcaagttctatgcatgagaatccctggacttgccccaggccaccctgtggtctgggacaggctcctcccgaccccaggggctcttaccgcaactgcaggaggcttggtgtgttgcagtggatggtgctgctcagctggtccagggtgtagtacagaggcacgtccgggagctcctgcgatgggggacaggatgggcatgagtggagatggacgggcacaggtggagcccccttccccgtcacagcccggctctcacctcagtgatgacgctcaggacccctcggatccgctccgaggtgtggaagcggccggggttagcgctcacagcctccaggacacggcccacaaaatccaggtcatggatgggctctgcccacatggggccaccaagctgggggcgcaccggggacaggtgagcagggactatgaccttcaagaccctcttgctcctttgcctcccctggcctagccctacctggtgtcgttgcccacagtgttcacactcgggggtcacagggggaccacaggctgcagagaacttggccctaaacagagaggggtggttggtggggagggaggaaaaccctgggactccccttcttctccttcctccctgctcaccggccgctggggactcctgacgctttgccgagacgctgaaggtggaaggccccgcagcccacacactggaacaccagcgcctgcttgctgtggggggtaccagtggccacgagttcccagcgtgaccacgacaccccaactcctcccttagactggctctgtcccttaagaagccccagatcccccagggcaaggtcctgtctcctctctcaatccaccaccgctctctgcccccgggctgacctggctgaggccttgaccttggcctggccggtgaagacacggacaaaaacacgcacgtagaagtcagcgctgatgctgagcagcggcaccacgaagcgctggtagcagttggcgcggaggtccaggctgtgcaggacgattctcagggcctgggggtggggggtgggtgtcagcctcccctccactatccacccaccccaccaggagccctatgtggtactcacaagtacaggctcagggccagctccctgggatccaagcccacccctgaaagtcctggctgtgggaccctcaacaagtgagtatcccctctctgtgcctcagtttcttcatctgcaaaatcacaacagtccctgtctgtggcactgctgggggcactaaacgagtgaggaaagcatagatccaacctattctgaccagcattatcggtgtgccatgtggcatgtactgaggacccacgttccagcccccaagggctctgtgggcaggaagtggggatactaggtgctgtagaactgctggggcctgggccgggcgtggtggctcatgcctgtaatcccagcactttgggaggctggtcaggagtttgagaccagcctggctaacatgatgaaatccccgtctctactaaaaatacaaaaaattagctgggtgtggtggcgggcgcctgtaatcccagctactagggaggccgaggcaggagaatcacttgaacctgggaggcgaaggttgcagttagctgagatctcaccactgcactccagcctgggcaacaagagtgaaactccatctcaaaaaagaaaaaaaagcaaaacggctagggctttcctgctagtgtgagactctgatatgggaaaggagacagcatttcccgggctgacttcatgacaggaccctttaggaacaagggcaagagccctctgtggaccacgctggagtgcagtggcactatcaaagctcacaataactttgaactcctaggctcaagtgatcctcctgcctcagcctccagagtagctgggaccacaggcatccaccaccacacctaggtaatttttagggtttttttgtagagatggggtcctcgctatgttgcccaggttcctgacctcaagtgatcctcccaccttggcctccgaaagtgctaggattacaggcatgagccgctgcacttcgccactcagccttcttgaatcctgatcagacactcaatagggtcagaccattttttttttttttttttgagacagagttttgctcttgttgcccaggctggagtgcaatggtgccatctcggctcaccgcaacctccacctcccgggttcaagtgattctcctgcctcagcctcccgaatagctgggattacaagcacccaccaccacgcccagctaatttttttttttttttttttgtatttttagtagagacggggtttcaccatgttggccagggtgctcttgaacacctgacctcttgaacaccgcccacctcggcctcccagagtgctgggattacaggcgtgagccaccgcgcccggcctatttttttttcttttttttgagacagagtcttgctctgtcgcccaggctggagtgcagtggcacagtctcagctcactgcaagctccacctcctgggttcacgccattctcctgcctccgcctcccgaacagctgggactacaggtgcccgctaccatgcctggctaagtttttgtatgtttagtggagatcagatttcaccatgttagccaggatggtctcaatctcctgacctcatgatccgcccacctcgacttcccaaagtgctgggattacaggcgtgagctaccacgcccggcctattttttttctttttgagatggggtctccctcccaggctggcgtgcagcggagtgatcttggctcactgcaacctcgcctcctgggttcaagtgattctcctgcctcagcctcctgagtagccgggattacaggtatctgccaccatgcctggctaatttttgtatttttagtagagatggggttttaccatgttggccagctggtctcaaagtcctgacctcaggtgatccacctgcctaggcctcccaaagtgctgggattacaggtgtgagccactgcgcccggccttcagaccatcattgtgcccattttacagatgcaaaaaaacccgaggaccagaaaggtgaagtcacttgcccagagctaccagcaaagctaggatttaaacccagtcctggaaaaacgacctttaaaaaaaaaatttttttttgaaaagttgttttaatacagaaaactaaaataatgtggccatgcactcctgtcctggccaaagccactgtccccaaatgaccatgattatcagccatgctcttaggaactatgtgggttgaagacacgcctgtcgttaacagcctgggatgcatctggccatcagcctggaggaagctgagcaggtctgaggagggggaaagtgtattgggaagggactcagacaaccacctgtcccccggtctccctggctggctggcagagggcccctcaccatctcgtggcaggcccggctcttgagggccatggccccgtacttgctgtagcacgtctccccgctgttccccgccaacaccgccatgtctgtgcaggtcacacacagcaaccctgcagagaggggctgggcagtgagaaccctccaacaccccaagccctgctcccaccccagtgccatccccacctcacctccttcactcacagcctgcacagctgcatccaggaaggtggctgggctgccataggggtccagatcgatgacgtcaaacctctccgacaccctctggtgctggtacatcagcatcctgggtgcaaagagggccaggtcctcagcctcccacgccaggtaccttctctgtcccctacacatattaactcgtacagcacagtggtttgggtctgaactccggggccagattcccaagttcaagtcctggctcagtcatttatttatttatttattttatttttgagtcggagtcttgctctgtcagccagctggagtgcagtgttgtgatctcggctccctgcaacctccgcttccccagttcaagcaattctcgcgcctcagcctcccgagtagagtagctgggactacagacatgtgccaccacgcccagctaatttttgtatttttagtagagatggggtttcaacatgttggccaggctggtctcaaactcctgacctcaagtgatccatccacctcggcctcccaaagtgctgagattacaagtgtgagccactgcactggccttggtcatttattaaactgcacaattttcctacttaggaaaagcaccatgtggaactcagtccacacatctaaaacaacaacaatactgatataagacgtatctgcctgacaccatttcaagcagtttatagatgtattaacacattttttttttcctttctttggagacagagtctcgctgtgtcacccaggctggagtgcagtggtgggttctcggcgcactgcaacttccacctcctgggttcaagcgattctcctgcctcagcttcccaagtagctgggattacaggcacgtgccaccatgcctggctaatttttatatttttagtagagacgaggttttaccatgttggccaggctggtctcgagctcctgacctcaagtgatccgcccacctcggccttccaaagtgctgggattacaggggtgagccactgcgtctgacctcattttaaaatttttgtagagacgggtttcactgtgttgcctaggctggtcttgaaatcctggcctcaagcgatcctcctgccttggcctctcaaaatgcttgattacaggcatgagtcaccatgcccagctaattacttttcattgtctgtgattactatttggattctagtaaggtcagaaaagtaaaaacttttttctctgtaaaaggtcagaaggtattttaggctttgtgagtcatatgtggtccctactgcatagtcttcttttttaacctttaaaaatgtaaaaaacattcttgggttgtgggccattgataaactaggctaggccgggcgcagtggctcacgtctgtaatcccagcactttggaaggccgaggtgggcagatcacttgaggtcaggagtttgagactagcctggccaacatggcaaaaccctgtctctactaaaaatataaaaattagcctggcatagccaggtgcagtggctcatgcctataatcccaccactttgggaggccgaggcgggcagatcacgaggtcaggaaatcgagaccatcctggccaccatggtgaaaccccatctctactataaatacaggtgggtgtggtagcagatgtctgtagtcccagctactcagtcgggaggctaaggcaggagaatcacttgaacctgggaggcggaggttgcagtgagccaagatcacgctagtgcactctagcctgggcaacagagcgagactccgtgtcaaaaaataaataaataaataaaaataaaaattagccaggcgtggtggcacgtgcctgtaatcccagctactcgggaggctgaggcaggggaatggcttgaacccgggaggcggaggttgcaatgagctgagatcgtgccactgcactccagcctgggcaacaagggcgagactacatctcaaaaaacaaacaaacaagcaaacaaacaaaaaaaggctgtgagccccacaggctatagtttgccaactcttgcgaaggtcaccaattttgcatgttttgtttcctgatgcatttccagttcttgaaaacggtgcctgacacatagcagacactggatatactatggctcatttgaatgaataaaaggagtgtaagaagttaaaacagagaccaggatgctacttatttctggcacagagtatggatcataccataattatctattactcatcacagcaacccctgtaaaactaattttctcagttgacagacaaggaaactggggctcaaagaggctaagtcactcactcaaggtcacagagtgagaatgtgacagagccagaatttgaccccaggcaggcttgtcccagagctaggctgtgatgcccagaacctaccgggcatctgcttggctcggctgtaccaggtgggccacgtcattgagctggacattccggcgtatgagatccacagcccgggtggaggcatcgtttgcaaccacagatctgagcccaggcacctctagggcaaatcgaatggaacgtaggcctgaagctgccaggccttccagcacatgcaggccttcctgttggagtaagcagaaaacctccctcacatctccacctccatcctcttctgggccccaaggagcccccaccacccacctcctatagctctccccctccaggagccctctgtctcccgctaaattccagggctgccagctcctatgctcaggccccacctcacagatctcccccacggccgctgtgcgaggttggtctcctgaggccaggttttcactctctttcagttcaaccttttcctcctcttgctctgacaagtccacgaccactttttgcgtgtccttctctcctggaaccttgactgcagccacccagaggcacaagtcagagaataacaaggtcccctctgagaaacctccccttaatctccaaaatatcgtccctgaaatccctgcggaaaggctgaaggagcagaacccagggcctgctatgtggctgaagcccctctggatttgggcggcagaagagcccaggcagggagataaacttgtgtgacccccgcccaccagaagcctggacctccactcactctggattcctttggccccaagctgaatgcgagcaaactcggtgatcacagcacatctggtgggagacagaggactagctcataccccgcccccgccatccacactgacccactagccgatgccaggctaacgtctgacccctgctcacgtcaggtcccgattgaattcctgcaccgggttataaaagacctcgttggcactgggaaaggcgattttggcagccccctcggtgactgtcgtctcctggacttcacgtggacgttcttctccgtagggcccggtgccgttctccatcgctgctgtattcggcagccctggagactgccactcgaaaaaccgggctctagagagcacccgggcggagcggaaagtgaggcttagccacagagacgatccttgcatgagacatccgctggcgcctccgcccgccaagcctggttcggggggcgggggagggcacagagagggtcagagagccgcattccgggcccggggatgtcctacatatctatgaggtagggactaggaaaacctgcggcctcggtaagctgatatcccctcgttttggggatgactggtccctgtggagccgatgccctcgtgcaggcccgccccgagtccgaatccctccccgcgctgcctagcccgtcctcacctgctctcgtagccacagaaaaccgaattagtcaaggtgcacgtttcccgaattaggacctgggcgccgccatgttggcacagtgggtgggcgaatcacatgatagtggttggccagtcaatgaggaaacgtacggtgggcggccgggatcaaaatgaaagccataaaggaagcgcgctgatcgtgctgttccgggggtgttaatcacagtggatcccctgggagaggacacgtccctagtcccatttcacagatgaggaagttgtggctcagaaaaggggcggtaagcggagaaacccaacacttattggtcctcttctgtgttctgggtgctatatacacattatttcagagcaccctgcaggaatgactcaggctctggagttggatttaccgggtttgaatctcagtcccatcacatgctctgggcaggttactcccgcggcttcacttttcttacctattaaatgagaatcgtggtttctcagatagagcaaagattaaatgacagattcctggaaagtgtgcaaagaaccactctaacattgtaagcgctcggtaaagttctaaccagtgtatgaaggcaggacagcgaagtggtcccggctacctgggttccagtctcagctcgccctgcgacttgttaactctgaacttaagttaccgcttttgcaaaatgggcagaacttttttttaccatttgttactgggttgtagtgagaagtaaacgagttagtgcaggtaaaatgctaacagaacctagcatccggtaagcatcataaaagtcttaggtcttattgtcgcttttgagcctgtgtttaaatcctggcacctaccatcacttccttgctgtgtgatgatcttgaccagctttcttcatttctctgtgcctccttttctttctttctttcttttttttttttttttgagacggagtctcgcccaggctggagtgcagtggcatgatctcggctcactgcaaccaccgcctcccgggtgcaagcgattcttctgcctcagtctcccgagtagctgggattacaagcgcatgccatcacgcccggctaatttttgtatttttagtagagacagagtttcaccatattggccaggctggtttcgaactcctgacctcaggcgatccacccacctcggtctcccaaagtgctgggattacaggcgtgagacaccgcgcccagctgcctttattttctatagtgtgtctgtagcagttctcactaaaaaatgttactgtgtagtttaaacgagctaattcccataaagaatgtaacgcagtgcctgccacaataaacagcagtcattattgtttttgttttacaggaaactaaagttcggaaaggtagagcgacttgcccaaggtcgcgggactagaaggtggcggggccaggattcgaaccatcgagctgagccgacgtactggcgaggatcccccaggggcatagagaggagacggagccggttagaaggggcgcgctcggagctcggctggcctcgcctggagggcggggcccgagggcggtgcgcgggcggggccggggccgctcctccctggcctggctgcggcggcagcgcggcttgcgctcgctcggcgctcggctggggcggcctggcccacaatgaatggccgccgcggctgccgctgctgctgaggcggaggccgcggaggccgcggaggcggaggccgaggccccggcgcagcggggcgcgccccgggcccaggcccggccccagccgccgctgcggagcccgccgggaccccccggagcgcggccacggcgcaggtgaggcggcccgcctcaggcccggttccggcctcctccagccggggcggcccgagggctgagtggggagggcctgggtgctttctcggaccgaggaggagccgggcccgcagcctgcactgtgcccgggcaggcgagtgtgtggaggcccagctaccgcgggcggccttgagcgtccagcccgagcttcagggcttgggggcggcaggatcgtacctggaccgctcccccgtctcccagcgagggagggggccaggtcgggccggggcaggtaccggggatccggggaagttggagggtccgaggcggaaaagtgaggaggttctcgtggatgccggagggggagggggagggggaggaggagtcgggctccggccaggccgagtgggggaggagaggagagcggcgcggccggaggggggcggggaggggccgggcctgcaggtaccgcctgggcgctggaggaggtgggtgggtcaagttacaggcctgggggcggctgaggagaagcccaggaagtggggcacggcgggtgtgggcggagttacttcgtgtgggggcggataggagatcccagagatgttttccgggggtcacatgaggtcaggactcagatgtggggagggggaggctagatgtgggggcgatcaggtaaggtgagggactgctgtaggagttttgggagtcgagagagcagagccttttgggctaggctaggggggatgtgggggcaggtcaggaaaagctggtgtgaccagaaggtatatactaagatgcgccccccaccgcccccaactcaagtgttaaggggttccgtctttctcacacctcatccctgaagcctctagagtcctgaccctaccccttgggcaagcctctgccaactgttcaaaggcactggccagtgggtgtttgtgtgggcagctggagacagtctggaacacctagcttaggcatcttgtttatcacaaggtggcccttgcccacccccaccttatatatctacagggaggcagcccagcagacgttacctgggtattttaggatcctgcattctttctctaccttttgtggccagaagctggtggttcaagcctagtggatgggacctcacagcaaccatcgtatatattagtaccatggcctcccaggcaccaactccttgagcctgagttctgtgtgccatctccctgggggtgaagaattagagggaatgagcatgtaaaactctgttgatggtggtttggaggctcccgacggggtgaaggcagggcacagagaagagttaaggggatcaaatcaggcactcacaccctggcccagggatctacctctgggacactcgtcctgggccaggccctgtgccgagctcgctggtcggatgagctcattgatggctcaccaccaccagttcaacttaggccttctctggggtccagacgaggaagctgaggctcggggtggtgtggcttgtctcagatcacatgagcagacagtggctgaactgggattgtctgaccctcagcccaaacccatagtcactcaagtggccttccaggagggtgactgaaggagctcctcgttctggattccctggcgggcgttctcctccgtccaggccttcccttctgctcaccccgggggatgggtcaatcccctttgggacagactgagtttccatggtgtccccggggaatggaacagtggaggtatctttctcggaggcctggtcaccccttcttccccatttccctcctgggagccaagaggtcaggagtcatggaactgtgggctgaccgtgggaagctgaggaggcctggcaccaccagggctggacttgactttgcttgcctagactgtttttgccccactttggcccccagtcggatggcagcagcttttgttcctttctgggctaattgcaaggctgttaccagggtgtccttgggactttgatttgggatcttcagcacctgaggcaggagccacaaactgctgggtcaagtggtgtcagccagttctgggtttaatgatgggttgtcaccctaattctccccagtctccctatagttcccaggacaccctccaacctgggccctgcccttcttgcctgtctggctagccacttggttctaggaggagtaggaactgggccagcagtcccgcaaagagactgaaccatccttcctggctggttgggccaggattgctgcaggtctgcttcagcacagactgggtcctcctggacctaagctgggttggataccagggataggggattggtggtaccatccagtcacttagctgagactgttgggagttggccctggtgagtgggggacaggcagtgcctcaggcagctccggtttgtgcctagaggtagaggagaaggcaccagtaataactgcttttcggtgagaacttagcatgcacagactctgtgggggcaagtgcaacaagtaggcagcccgttgagacagttttatttcactgctgggtgctgactccccgctgggggctggggaagcatcccggagtaacagatccagagcagctagctctcaagcgaccaaactttcacaagcaaaggatcaagataatttcacatacttctgtgtttacaaagatggtgtagcaaagtgaagtcattatgagccatgaggggatggggaggtttcgatgggtggccggaagtgttcccggagagctaagatctgaataataatgttagctaaggggtgggtggtgctggggcgcagggaggggtcagtgttctaggctcaggggacagcacattcacagcttttcttgagtatgtaccagtcttcttctgagtgctctaaacattttgtcttcatgagggaaggagtggggggatgaccctactgtggagacagagactctagtaccattcacaagagagtgaagccctgtctctgggtctcctggatctgcccatcacccccagatggaagttcagaaccccttggcctgcatctagggtatttaaaaaatctggcctcctggccgggcagcagggagccccagcaggttcttgagctgggctttgaggagatgtgagttttggtcagccttacagggtctattgaaggagtctgcctggaggcccgggggtttggagagagtttggggttggcccaacattgtctgaccctagatttcatcagtgtcattgccagagcctgtgtggagagagggatcccatcaggcttggtggggcatattgcttttgggatggtggtgagccaccggggctggaaaacatgagtcagtgttcatgccactctgcgtcctcagatcctccgtgcccctcgtttctcctcctaggttgctctcagcacttgtacacactcgaactcatttaagcccgtggctagcaggtcctgcctgttatcatcatttgacacacaaggcaactgaggcaccctagtccttccttcacacaagctgcaaagtggtctggctaccacccctgtgccgccttccagccactttcatgttcctcgtgtctgcatttgctcctcagtcctctcagccgctactgccttcccctagagaaccctctgggccgcatgaggtggggccgggaggtgggactgggcctgcttgcacattaggtggggtgaggaccagccgagccggcagaggtgacgtgtcttaggttgtgatctgtgtgtggttgtggtcatgtccctccagccttctcatgtgctgcctccttggcgaaggtctcagttcttagagacctgtgcgtcttctctgagggctttgactgtgtccagttcgtggtttctaaatcgagcaaagggagagggtaggtaagggtgagcagacacggtctagtagagagtgaaatttcacacttagcaccacccctgtctcagccatgagactctgggcaaaggtctttacctctgagcctcagtgtcctcctctgataaggagtgacaagtgggcacaactatactgctgtgattcgcaactgggtacagtcctacctccggggacacttggggaatgtctggggacatttttggttgcccctgccgggggggggggggtgtgctgctggcatctagtgggtttataggccagggatgcggttcaacatcagacagtgtgtagggcagcccccaccacaaagaatgattgacgcaaatgcagtggctgggtggggaatctccactgtctggttatcatgaggtttgcgggagaggttggcgtctggggtgtgagtggacagtgctgtgaaggctctggggaaaaccccagcgatcactgcctgttaatcccatgaaatgtgcgaggtctgggagatggtgagaggcataagatgtcttctactcccagggagtttgcggcccagcacggggccaggggatacgactaacagcagctggcattcatgagcaccgactacggggcgagcgccgatcggcctgtgttctttggttgtttaatccttgaaatagccttgtgaggtggctgctgctgtcagcccattttctagatgggagactgatatggggggtgagcagtattgagggtaattctgagtgacaagctctataagggatttgagcctagtacaatagtaggattcaaaatcttaggtcctgcgtggttccctagcacagcccagcaggcccctctcccaggatgatccccatccctccaccctcctttgtgttagcggcaccagggtcacctcagggcctttgcacttactgttgttccctccacccttggttgccgccactgctgccctgtcttttgggtatgatctgattacacgcagggagtgggatgtaactccgaagggtgggcttatggttggagttggtggggagggagcgggcaggctgcgagctccatgaggacggaggcagagcttctgccaggctctccaaggagctggagctgctgcctgcaaagggaggccagattgccgagggctgcgaggaggagcgagtgggaggagggagaggcagcacgcggagactgctcattcccggagatggtggttgcagggagaaggggctagagaatagctgcagttgggaggattgggaaaggaagaatgaaaagaatgaagaaggccttccttggggattagagagagggcaccccagaccctgaggtggaggtcctcagacaggcagaagaccctgtttctggagaggacacatccagtagctcaggtaaagagccccagctctgggctcggccggtccggggttcccgtctggtctctgccttgcttctctgaacaccagttttcccacctgtgaaatgggtctagtcacagctgcctcacatttttgcctgattcgggagccagacggcctgggtataaacctgtgcctgccattcaccagctacatgttccccacctctggcttcacctctctgggcctcattcccatccatgaaatggcaggcaggctcatttcttcctcagaaactgtaaagaagagtaagttaaatgagcctgtctgagccctggccaggtatgggcccagtcagtgaggcttgagtaggggacactgttactaatcctattccaccatggatttaacaatagtcattcagggaaagagataacgaattaaatctgtgggtgtataagaaaaaaaatacaggccaggtgcagtggctcacgcctgtaatcccagctctttgggaggctgaggtgggcggatcacttgaggccaggagttttgagaccagcctggccaacatggagaaacccagtctctactaaaaatacaaaaattagccaggcatggtggtgtgtgcctgtaatcctagctactcaggaggcggaggcacgagaattgcttgaacccaggaggcggaggttgcagttagccgaaatcacgccactgtactccagcctgggcgacagaggaagactgtctcaacaaaaaagaaaaaaaaatactgatgcaagatgaggtcttgctgtattgcccaggctggtctcaaactcctggcttcaagcgtcttcctgcctcagcctcccgaagttctgggattacaggtaggagtcaccgccccccactgaacagtttgttcttcactaactgttttcctggactgccttcacattcagcccctacagaggggtctttctggttctgggtcaggcaggcaacctgagtagctgccaggatccagccacatcctgctgagctgcatgaaggactgtggggctctctggggcctttgttccttgttacacttggagttgctggtctcccttaactggcttgtaggtcttagcccatctgggctgctgtaataaaataccttagactggaagccaggcacattgctcatgcctctaacctcagcatttaggaggctgagatgggaggattgcttgagcccaggagttcgagaccagcctgggcaacatagtgagacctcatctttacaaaaaaatttaattttaatttgtttttcacccgtgacacagccctcaggaggtcctgagaacatatgtctctcgtctttgcaaaaaattgttttaattagccgggcgtggtggcacacatccctagtcccagctactcaggaggctgaggtgagaggataacttgagcccaggagtttgacgctatagtgatccaagattgcaccactacgcttcagcctgggtgacagagcaagaccctgtctcaaaaaaacaaaacagactgggccattgataaacaacagagatgagctgctcatagttgtagagggtgggaagtcccatatcacggtgctagcagattccgtgtctagtgagggcccatctctcatagatagcaccttttaggtatctgcacagggtggcaaggacaaacaagctccccctcttttatacgggcacagttcgtattcatgaggacagagccctcctgactgaatcaactcccgaaggccccacttttttttttttttttttttttggtgagacggagatttactcttgttgcccaggctggagtgcagtggtgcgatcttgactcaccgcatcctccgcctcccaggttcaagcgattctcctgcctcagcctcccaagtagctgggattacaggcatgtgtcagcatgccaggctaattttgtatttttagtagagacggggtttcactgtgttgcccaggctgatctcgaactcctgatctcaggtaatccgcctgtctctgcctcccaaagtgctgggattacaggcgtgagccactgcacccagccctttttaaatttttgatcaacaacttcttttttattttgagatggagtcttgctctgttgcccagcctagagtgcagtggcgtgatcttggctcgctgcaacttccacctcctaggttcaagcaattctgcctcagcctacctaatagctgggattacaggcgtgcaccactgcgcccagctaatttttgtatttttagtagagatggggtttcaccatattggccaggctagtctccaactcctgacctcaggtgatccgcccacctcggcctcccaaagtgctgagattacaggcgtgaaccaccatacctggctgaaaggcctaactttttttttttttttagacggagtcttgctctgtcaccaggctggagtgcattggcccgatctcggctcaccgcaaccttcgcctcctgagttcaagcgattctcctgcctcagcctcccgagtagctgggattacaggcacgtaccactgtgcctggctaattttttgtatttttagtagagatggggtttcaccatgttagccaggatggtctctatctcctgacctcgtgacctcgtgatccgccctcctcagcctcccaaagtgctggggttacaggcgtgagtcaccgtgcccagccagccccacttcttaataccactacattggagataggctttagcatgtgaattttgggaagaggcaaacattcagaccatagcatctgtcgacggccatgtcacagcttccctggaaagacatcaggaaaggactgtgcctttgacagtctctcacaggcccatgctggctggggaattcctcagctctcttccctaagagctgacagttactactcccaggaatcatcctgccagcccccttcctgcagatggcaggatccaccggcagtgtgagcaattcgtcaggtaacactgcggtctcaataggcccctgactgctggctacccaccttggcagctgtcaaaggaggtcgtctgtctgcccagccacagataatgcttctgagccctattcctgtttgagccacgttaatgtggaacaaaacagggagttaggttaggaggaatggaagtaattctttgttcattttttccacgaaggactgtgagcacccactgtgtacctggccaggtcctaggggtagaggacacaacagggatctacacaggcaaactccctgccccagggaaactgacatgaagccccaaaaaatgcccagtttggcaggggtggtggctcgcacctgtagtccgagcactttgggaggccaaggcaggaggaccacttgagcccaggagtttgagaccagcctgggcaacattagggagacctcgtctctattactaaaaaatgcacaaataaataatttttttttagaaaaagaaaaatggccagcttgctaaataaatcataggaactcccaagaaggataagtcaagcagggagaatcaagccagggagttagtgtcgggaagggctttgttggtcagacgcagtggctcatgcctataatcgcagggttttgtgaggctgtggcaggaggaacactcagctgggagttggagaccagcccaggcaatatagtgagatcacgtctctaccaaaaaaaaaaaaaaaaaaaagcatacatatacatatactttttttttttttttttttttttttttttcggttaactggatgggccgggtgccgtggctcacgcctgtaatcccagcactttgggaggtgggcggatcacttgaggtcaggagttcaagaccagcctggccaacatggtgaaaccccatctctactaaaaatagaaaaattagccaggcatggtggtggttacctttaatcccagctactcaggaggctgagacaggagaatcgcttgaacgattcttgcagtgagccgagatcccaccactgcactccagcctgggcgacagagcgagactctgcctcaaaaaaaaaaagaaaaaaaaaaattagctggatgtagctcctgtggtcccagctatttgggaagctgaggtgggaggattgcttgagcccaggagtttgaggctgaagtgagctatgatggtgccactgtactccagcctgggtgacagagcaaggccctgtctccaaaagcaaaagagtagagaaagggctttatgtgaccagggagagtatgaagagctatggctgtcccattcccattctagtaggtccgagagcaagcagggccagactgccaggggccccaataaagcattgtaggggcccaggcagtgtcacttggggccaaggtagtacaaagtggttttgaaggagttgaagatgaatccaaggatctgaatgaggagggccagagctggtgaagctacggcattcacaggttttgggaaggactggagccaggtcctgaaattgttgagtggaggtgtctggggtgtgtgcgagtctggcattcacagggaagtccgggccaaagactccagtgggggaggcatcagtgaatagatggtgcttcaggcctgtcttagtcagctcaagctgccacacaacaaaatatcacagactgggtggcttaaacaacagacatttatatttcagagtgctgggggctggcagtctagatgagagtgccagcgtggtcaggttctggtgagggctctcttcatggcttgcagacagctgccttcttaataccaccgttatgacctcaattaaccttaattagctcccaaaggttttatctccagatacaggcacattggggctcagagtttcaatctgtgaatttggagggacatactttgtccatagcagagccctgagactgagcccagtcccctggaggtgaaaaccctttctggaagggccacactccccatccactactgcccttcctagatctcagctccagtgtcaccccttctgggcaaggtcaggcaccccagtgtgtagcacattgatctgtgtgaccaaggatgaatggccctgtctcctgctggactgtgagctccagaggcagggctactttgtcaccattgtggcctgcccaggcagggacctggcaaatatttattgagtagttgttgggaagtcatggaaaccgtgtgctgtgcccttgggtctcaccagaagatctgctcaggcccagggccaggactaggcactgtcctggccaggaaggtcccagctgccctgtggcctcctgcccttgtcccccacaccctcaggggtgctgatatgctgaattttaaggagagatgattctcatatggttttctgcccttggggagtttatagtcaagtgggacttagtttcctcagaggtaagcttaagggcactgtggccggggtggggcaggagagggacatcttctctagcctggagaagtgagtagctgagggtggaggaagagggtattccaggcagggtgcacagcttgggcaaaggcctcgctgcagtagaggaggaccaggcagtgtgtttgagcctgacttaggtggggatttggtggggactagaaccattaggtggtttagagacctcaatcctcgactccatcccacccctgcttcagccagcaggtgaccctgctagggacctgccagcgagagacccgtttcctctgagtccagtcatgctagctcccttcctggggctagcgtgggtgagggcttcttgcaggggcccacatagtttttctcctgagtccattgggcaggattgggccggattgggccaatcacagagggatggaggggttcccagagatgggtctgctctggcccacactgcagctcacccctgtccactctgtgcgggggccactggggaactagacgaacagcattcaggtcactgtggctcacagacccgtcgccccactccgctcgtccccagcagcatggagggagggagagctcccgtgcgctaattggctgagctatttggaccaattgctaatcaaaggctccaaagccctgggtgctgtggtgctgggctctgaagctgaggttcacaaggtatgggggacctcagtctgagcatcaggttggctctcattctcaggaggggacctgggccaccttcccaacccccacatctctgttgcctcctattatccccgtaacctttcagtctccattgccaaatgggggggttcaagaccagcctggacaacatagtgagaccctgtctttaaaaaaaaaaaaattacctgtggccggtgctgggtgcttggtaaggtcaccttgaagcagtcctgtgcccgttctgcactgttttgtttgtttgtttggttggctggttggttggttggttttggtggggtagtggggtcgggggatgtggttttttgtttttgctttttttgttttagagacagggtctcgctctatgacccaggctgaaatatagtggcacaatcatcactcactgcagcctctaactttttggctcaagtgatcctcccacctgagcctcccaagtagctgggactacaggtgcaagccaccaagccccactaattttaaaattttttgtagagataggggtctcactatgttgcccagactggtcttgaacccctggcttcaggggctcctcctgcttctgcctctcagagtgctgtgattacaggcgtgagccaccgtgcccagcctctctgcactgttctttaacacatttacaaatatttactgagcatctatttcattctaaagaactaatcttgaataaaaccagccagaatgtttgccttcattgagctgacagtgcccttggaggggttaactgtacatacacctcttttttcttttcttttttttttttttttttgagatggagtatcactctgttgcccaggctggagtgtagtgactcgatctcagctcactgcaacctccacctcccaagttcaagtgattctcgtgcctcagcctcctgagtagctggaactacagatgtgcaccaccacacccggctaatttttgtatttttagtagagacggggtttcaccatgttggccaagctggtcttgacctcctgacctcaggtgatctgcccgcctcagcctcccaatgtgctgggattacaggcgtgagccaccgcgcctggcctgtacatataactcttaaaatgctgccctgaccctggggctcactttcaaagatgtccacactctgtaggccaggaccccacctgtcccatacccttcctggcagccctgtccctgctacatcgcccttcagctacaccagctttctttgggtccctggaccacacctgataccttcccgcccagaagtgttatctctgtcctggcagttgctcaaccttttatggtccctaccaccaaggccatctgcttggttgacatacccaccccaactgtaattaaatcatccccggtgtctcctcactagacagctccacataagcacagctggtccttttagggctgtgtccccagcacctcccacaaaggaggatgcagttcatcaggatgggttggatgaacagcccattttacagatgaataaactgaggcacaggcaggtgcaggattttggcagcactgcacacctgtcctggctttgtcctcctccctggggaatgagcttggagcacccctctaggaactgggatgccagcctcttcccttgaccatcttggtccttgtcatgtgggccccagtaccaggggtggctttaatttggctgcccagggaggtggttcagggctgccaggacccctgaagtaggctctctgggctctgtcctttgccccccaacatggtgcctgtttctcctgcctcttcatgcagagtggccagctcctggcccattcagctctgagtttgagctcctgggcggagatttttgttgccttgtaactgggattcctagatccagcctccaccctctgattgccctaaggaggttttggggttttgttttgttttgtttgtgttttcgtaggatggtggcagtgattttgaggaggggaagaggaaggaagatacaagcaagggaagtcacaggctgtggtgcctaggcagaccctggtttgaatcttggccttaccactttttgcatgtaagtggtaggggcagcagatagctcaggacatatcttgggtttttttgtttgtttttgttttgagacatagtctcactctgttgcccaggctagagtgcaatggcacaatcttgactcactgcaacctccaccctcccgggttcaagtgattctcctgcctcagcctcccgagtagctgggattacaggcaccggccaccacacccagctaatttttgtatttttaataaagatggagtttcaccgtgtttgccaggctggtctcgaactcccgacctcaggtgatccacctgactcggcctcccaaagtgctgggattggccaggtgtggtggctcatgcctgtaatcctacactttgggaggccaaggcaggtggatcatttgaggtcagtagttcaagaccagcctggcctatgtggtgaaaccgcatctctactacaagtacaaaaattagccggacatggtggcacacgcctgtaggcccagctactcaggaggctgagaatcacttgaccctgggaggcggaggttgcagtgagccgagatggcaccactgcactccagcctgggtaacagagcaagactctgtcttaaaaaaaaaaaaaaaaaaaaaagtgctgggattacaggcttgagtcatcccgcccttcaggacatatcttttgaattttgaacctggtgaatgaatttttagatgacctcaggacagtcctcaatttccacatgacctcagtttttccagctttgcaaggggagtatgaaaccagccctgaagtcttgctaagaggattcggggagctcatagaagttgtgagttggttcctccattcgcctgggtgttgtaaggggcagggcctgtgtcttgcttgtggcctgccagggtagcagctcagtaagtgagatggtatctcactgtggttaggattcacatttccctgatgactagtaatgtttccgtgtaatttcttgaatgatcattcagtaacaataagtgtaggttgagtttgtagaatcaggttgacctcctcagcctcgatttccaaatggagaaagcagagatttggagctcctggtcagaggagcaggtcggtgctggagccaggactcaaccttaggttgtacctctgagcctttgaacacttgccgtttctattcctcacagcagccctttcagacggaacgggtgttaccagattaggaggagagtggccactgtattctcagtgcccagcccagggaggcagatctgagtggagttgctaatgaaacatggaaggtgcttgagagctaactggaagggagggaaggtgtgcattcctgcaccagggcctttgcatgtacttgttactttctcctgctggccagctggagtgtctggaaagatctgccttactcagggaagccttctcactcgcactctgcccagttaggaccactgccctctagagaccctatagaattacagaggaggccgggcgtgatagctcacacctggaatcccagcactccagcctgggcgacagagtgagactccatctcaaaaaaaaaaaagaaaaaagaataaaccccacacacctttgccttccctttgctttccctcaccacacccccattctccccgcctcccagcccctggcaaccactaatctgcctcctgtctgcgtggatttgcctgtcctggacatttcctataaatggatcatacaatctgtggtccttttgtttggcctctttctgttggaataatcttttccagggacatccatgttgtagcatgtgtcagaatttcctttctttttatagctgaataatatcccattgtatggactgaccatgtttagttggcccatccatccgcagatggacgtttggattgtttccacctttgggctattgtgaataatgctgctgtgaacgtttgtttacaggttttcaatgcaggcaaatgttttcgtttttcctgggcataaattccaggagtggaatcgctgggtcatatggtaactctctttaaccgtttgaggaaccgtcagactgttctccatggtggctgtgccatttgacattcccacaagcagtggaaatgggttctggatttctcatcctcaccaacttttttgattccagccatcctagtgggtgtgagatggtgtctcattgtggttaggatttgcatttccctgatgatgttttcttctaatttccctgatgactagagatgttttcatgtaagttatttatttatttatttatttttgagacagtgtctctgtctgtatcccaggctggagtatagtggcgcaatcacagctcactgcagccttgacctgggctcaacaacagatccaccccccaccacaccctccctagtagctgggaccacaggtgtgctccaccatgccggggtaatttttgtatttttcgtaagaggcagggtttcaccatgctgcccaggctggtctcaatctcctaggctcaagtgatccacacgccttgccctcccaaagtgctgggattacaggcatgagccactgcacccagcctcatgcaatttctttttccttttttttttttgagacagtcttactctatgccccaggctgaagtgcagtgccacaatctcggctcactgcaacctctgtctcctgggttcaagtaattatctggcttcagcctccctagtagctgggactacatacccacaccaccttacctggctaatttttgtatttttggtagacagggttttgccacgttggccaagctggtctcgaactcctggcctcaagtgatccgcctgcctcagcctcccaaagtgctgagattacatgagtgagccactgcgcctgacctcatgtaatttcttgagtggtcatttagtcattatacaaacagtgattgaagggcatgtgcccagcactgcagactctgctgcacagtcagatgaccctgcctttctggcatttccatgccagtaccctgaagagataccatatatgtacctggtgcttgcaatagctggcactcagaggtagcacactgtgtcctagccactcttccgagcacttaagcatattcagttactcttcaagtacatatgaataagtatgcctttgccccctcctctttgcaagggatagcgtgtggccaccctggtctgcagctagcttagcagatttgaccacatattgtaaaagtgagtctgtaccaggacagatagggtagagggctctgtgtggtttagcaccatggtagattccatcgtgcggatgtccctccagcaggggaggtctttggggccagggctaggccagcacccacatttgccgcctgaccccgtccctccgtctctgtctctccattcctccctgcccctcgtgcagccgctgccatggcccagacactgcagatggagatcccgaacttcggcaacagcatcctggagtgcctcaatgaacagcggctgcagggcctgtactgtgacgtgtcagtggtggtcaagggccatgccttcaaggcccaccgggccgtgcttgctgccagcagctcctacttccgggacctgttcaacaacagccgcagcgccgtggtggagctgccggcggctgtgcagccccagtctttccagcagatcctcagcttctgctacacgggccggctgagcatgaacgtgggcgaccagttcctgctcatgtacacggctggcttcctgcagatccaggagatcatggagaagggcaccgagttcttcctcaaggtgagctccccgagctgcgactcccagggcctgcatgcggaggaggccccatcgtcggagccccagagccccgtggcgcagacatcgggctggccagcctgtagcaccccgctgcccctcgtgtcgcgggtgaagacggagcagcaggagtcggactccgtgcagtgcatgcccgtggccaagcggctgtgggacagtggccagaaggaggctgggggcggcggcaatggcagccgcaagatggccaagttctccacgccggacctggctgccaaccggcctcaccagcccccgccaccccaacaggctccggtggtggcagcagcccagcccgccgtggctgcgggagcagggcagccagccggtggggtggcagcagcagggggtgtggtgagtgggcccagcacgtcggagcggaccagcccaggcacctcaagcgcctacaccagcgacagccctggctcctaccacaatgaggaggacgaggaggaggatggtggcgaggagggcatggatgagcagtaccggcagatctgcaacatgtacaccatgtacagcatgatgaacgtcggccagacaggtgaggtgccgtcctgtcccccatcccaccagccacccctgctcctcctgccactcgcgtgccactctctccctgcagccgagaaggtggaggccctcccggagcaggtagcccccgagtcccgaaatcgcatccgggttcggcaagacctggcgtctctcccggctgaacttatcaaccagattgggaaccgctgccaccccaagctctacgacgagggcgacccctctgagaagctggagctggtgacaggtgggccggtctcgccccagatctctcccctccgcagctttggagccggctggcctgggctgggctgggcagctggttaggagcccccagcacctcagtttccctatctgtgctgtagtgttggtaacagccaccctaagggtgggggcgttggtgagatggaggagctgatacagcaaggcctggcctctaggtttctggcttaaggggtcggggcgagcattggctattattgtttggccgcatgggtagattagctacttcccgggctcctgtgaaggccagctactacctaggttaggaatttggacagtcacaggggcgaatgcctgtagtcctagctactcaggaggctgaggtgggaggatcccttgagcccaggaggtcaaggctgcagtgagctgtggtggccactgcactccagcctgggtgacagagtgagacttcatctcttaaaaaaagaagaagaagactgtgtttggtccttgggtcagagtgcctaggtgtgagcctccactccctgttggtcctgctgagcttgggctcatctctagctggtgacagccagcgtgcccacctcacacaggcttgcggcacgactggccacacagcaggcaccccgaggatggtgaagcaaccctttctgtcctttcctgagcactgatgaggttgggggagccccaaggagcctcccctgactgcccttggtgggtagagatgtaggggagaaggtccctgggtgagttttcttgggacccagagcccagcagggagggcctggggtgttctgagatgaggcctggtatcatgggggctgtggcggtttgggggcaccccaggccatcctccggcttcctctcaccaggcaccaacgtgtacatcacaagggcgcagctgatgaactgccacgtcagcgcaggcacgcggcacaaggtcctactgcggcggctcctggcctccttctttgaccggtaaggcccttgccagagccccagggaggggggtggggtttccccatgtcccccccaccaccaacttgagcgctgactccctccatgtcccctgcccccaggaacacgctggccaacagctgcggcaccggcatccgctcttctaccaacgatccccgtcggaagcccctggacagccgcgtgctccacgctgtcaagtgtgagtgttggcccagctggacgaggcgtgggcccggggcacgcaggttgacgttttttcccagccttggctctcagagagggctagagttcagtgttgagaagcattctggggctcattctagccttgctgggaaaccggctgtgattgcttagagatttcttcgtgtttgggggatgcacgtgccgaagggaagccagggagcctgtgtcaggcaggagggtctcgaactcagggcagtctgggagggatgaggcagccagacagtgctagccactcgtcatggggggcatctagattttcaagtgaccactccccgttactaaattctggcaaatgatccgaatttttcaagaacacggggccatcccatcaaaaccaacacatccccacacatggctgaactcagtccggtgtagggttgggtgcacgtagtgtggtgtcctggccgcgtggcctcactcgtttcccctttgagagggagtcgcagatgctgtaggggagctggtgagtaggccttgtgggagtcacctggcccccgtgccaaggccgcacccaccctgccccacagactactgccagaacttcgcccccaacttcaaggagagcgagatgaatgccatcgcggccgacatgtgcaccaacgcccgccgcgtcgtgcgcaagagctggatgcccaaggtcaaggtgctcaaggctgaggatgacgcctacaccaccttcatcagtgaaacgggcaagatcgagccggacatgatgggtgtggagcatggcttcgagaccgccagccacgagggcgaggcgggtccctcggctgaagccctgcagtaacccgcccagcctcccgcggggccacacacttcccctcccaacacacacacacacctgccatcttggtcatgagctactgtctgtccctccccaggacccgcggtgggtgctgcatgttcccggccctctgcccctcctgtcctaccccctttccccaccgagagctgggccgggagaggaccgcagggcaggtggcgtgaggtccgtgttgccttctttaacacacactcgtgcagtgggggagttctggctccccaacctaacccctagccgtcatctccacactcaccaggcccaccaggggagggggctggcctgggggtcttgggaaggcccctccccaggccctaggccacctcgcggaagccttcagcctccgcccctcactgcagccccttgggacttgaggggggccccaggggttctcaggacccctcccaccacctcccagtgcttccacgtctccaaaagcgccttcctgtcaccctcgtctatccctgcgcctgggggctggggtaggcgaggccgtggggactacccattttatagctggggaaacaggctccgagaaattgcacaaccgacctcaggtggccggcagtggcgtgcctggtgccctttctcctcttccgcctctgttgctccctttggtcctctggggcctcagagaggcaggtcctaaaggagggggggtctcctgggggcagaccgagggtctcggaggatagaatgagaggtttccagggctggcagagtgtgtgcgtgtgtgtgtgcagaagttttgctttcaaacaaatgaagatacaagaggcagtaggacctgggttggaacccaggggagcagactggggggctgttgcccctccctccatctccccacacccaccccaccccacagcagggctcctggcccccacccccctgtacataatttttaaaacctttttttagcgaatgaaatattgaagtataagattccttttatttttcaaaccaatggggctgtgtctattgtccccctcggtccccaggggtggggggccttggaaggcagggcggtgttggggggctggggggcaggctgaatgtgtgtgtgtgggtgtgtatgtgtggagtgtgtgtgtgtgtttccatggtaggactccagtcccagctgctgcctaggctcctgtgggtcctgtgggtccccctcccctgttcaccttccccaacagggctatagtttaagggtgtcccaggccttggctggttggctgggcccagctcctgggggctgggcagggcagggcagggccgggtccacttccattgttagcagttgtttgcagaattttctcttttaccattcctctctttttgttctcgcccagagtgggtggttttttgttgttgttttagattttcatgtgaaggcagttttttttcttttttaactccccatccccctatgcagggtgtcatttcaccatccacatccacatccttgtttgtgtttctggccctcgtcctccctgcctctcatctgcctccccaacccccacctacccactgctcccaggggtctctccaggggcagggggattttaggagatggggtgggggccagcccctactggacccttgtaatctgatttggagaccatccccccgatgggaccagcagccccgccggcccactgggggtccctcttaacatctgcttgttgcgggggtcagtcatgagtgccagggtctggctggggtcttggcactgtcttcctggccggggcctgaaaccttagcccccagccggcctgagtgggggatattgacacccccagctaaagcacaagcaccttagtcacccctcctctccccccgcctcctggcctgccaccccaccccagcgtttaccccaaagcacaatgccctggtcacttggcaagcggctgggcctgacggaggccgaggggcagaccggggctccagccagacccctgaaaggaaggtgctcccccacttccaggccttagttggggtgggggggccagctcctgggcctggggtcttctcacccccacccccttgtcctgggtaggcccctgcctgcccctctctgccttttcctcgggtgtccctcctcgagcccctgtggcattggcttgggtggcagagcccacttgtttcagggaccccaggaggtgccccctggctcccaggactgtgtgtgggtccggggggtgggggggtggggagaagggtcgggcagggggtgcaggggaggaaactcctcaccaggagagccaaagacagggttgtgccttaccccaggagccacccctgtaccccccttgccctgccattcaccctccacccctacccctgggcggcctgctgctttttccttctcttcctcccctgccctgagctgcatggttcccccaccctgggcagccaggaaggaatctgaatggagaatcaccaaccaccagagaaaaaagactgtggggccctcccctgccaactccccttccctggccgcccactcaacccacacctctttcacgcaggacaggctgcccaccctgtccacgtgaagtgccaacgccctccccaccctgggccgagcccccacccctccctgggcccccaagtgagattgcacatttaactactgtaaggagaggagcggcgttggcaaatgtgaaccatgagaatatcagtgatactgatgagaataaactaaacgcctttgtaacagccttgccgcatgctcgttacttgggggcccagggaggaacacacacctgcattgtgcccagcagacccaggttgctgactgcaaactgacagcctccgattctaacacgcatgcaagttaccccaacagatacagataacgcaacatatgagctggtcctacacacacacacacacacacaatttttttttctttttttttttttgagatggaatttcactctgtcgcccaggctagagtggcgcgatctcggctcactgcaacctctgcttcctgggttcaagccattctgccttagcccccccaaatagtggggattgcaggcacccaccaccatgcccggctaatttttgtatttttagtagagacagggtttcaccatgttggtcaggctgggctcgaactcctgacctcaggtgatccacccgccttggcctccccaagtgctgggattacaggtgtgagccaccgcgcccagcattttcttttcttttttttttttgagtcggagtttcgctcttgttgccaggctgtagtgtcatggcgcgatctcggctcactgcaaccaccgcctcccaggttcaaatgattgtcctgcctcagcctcctgtgtagctgggattacaggcatgcaccaccaggttcagctaattttatatttttagtagagatggggtttctccatgttggtcaggctggtctcccaaagtgctgggattacaggcatgagccaccaccacacccagcctgaaaaaatacttttaattagctgggtgtggtggcatgcacctgtactcccagctactctggaggctgaggcaggagaatcacttcaactgggaaggtcaaggctgcagtgagctatgatggcaccactgcactccagcatgggcaagagtcagatcccatctcaataaaaaaaaaaaagggagctgtggctctgtcaattttacagcaacactggctcactcggtgcccgcctgtgccgtggctgatatgccaagccccagaaacacatcccatacacacacactccacgccgcattcagaagagcattcatgcattaaaagaacataaaagagatcggcagggcgcagtggctcatgcctgtaatcccagcacttcgggaggctgaggcagatggatcacctgaggtcaggagttcgagaccagcctggtcaacatggcaaaaccccatctttactaaaaatagaaaagttagctgggcgtggtggagtgcgcctgtaatctcagctacccaggaggctgaggcaggagaattgcttgaacctggaaggcggaggttgcagtgagccaagatcgcaccattgcactccagcctaggtgacgagcaaaacttagtctcaaaaaaaaaaaaaaaaaaacgagatcacaaaatttaaccgatattggaaatatctgggtgaacaagagggtcccaagaatatgaaaggacaaatggttctatcaagtaggaaaaaccatggatgcaccgtgggtccccatagactcaaagataacacaagattaaagtaactgggctgggcacggtggctcatgcctgtaatcccagcattttgggaggccgaggcaggtggatcacctgagatcaggagttcaagaccagcctggccaacatggcaaaaccacgtctctattaaaaatacaaaaattatctgggtgtggtggcgggtgcctgtaatcccagctactcaggaggctgagacaggaaaatcacttgaatgcgggaggtggaggttgcagtgagacgagattgcgtcactgcactccagcctgggtgatagagcaagactctatctcaaaataaataaataataacatagaagccagtcatgatggctcacacctgtaattccattactttggaaggctgagagaggaggatcagtggagcccaggagtttgagaccagcctgggcaatatagggagaccctgtctctacaaaaatgaaatagccaggcgaggtggcatgtgcctgtggtcccagctacttgggagactgaggtggaaggctgccttgagcccaggagttccaggctgcagtgagccatcattatgccactgcactccaacctgggagacagagtgagagagaccctgtctcaaacaaacaaacccaaaataggccaggcacagtgactcatgcctgtaatcccagcactttgggaggctgaaataggcggatcatttgaggtcaggagttcaaattcaagaccagcccggccaacatggcaaaaccacatctctactacaaataaaaaattagttgggtgtggtggagcattcctgtaatcacagctattcaggaggctgaggcatgagaaccgcttcaacccaggaagcagaggttgcagtgagccgagatcacgccattgcactccagcctgggcgacagagcgagactctgtctcaaaaaaatataaataaaaataaaaagatcaagagaacctaaaccattaaaaaaaagactcgcatgggtgcggtggctcctgcctgtaatcccagcactttgggaggctgaggcaggcaaatcacttgaggtcaggagtttgagaccaacctggccaacatgaggaatcccatctgtactaaaaatacaaaaattagctgggtgtggtgacacacacctgtaatccaagctacttgggaggctgaggcagaattgctggaaaccaggaggtggaggttgcagtgagcagagattgcaccactgtactccagcctgggtgacaagagtgaaactctgtctcaaaaaaaaaaaaagaaatccggaacacgcacatgtgcacacacacactggagcacttgtgcaagcagtggcttagaatgggagtcccaatcagggctcggtcacgcatttgcagtcaacacacaccacacgacacaaatacgtataaaaaaggctgacattttatttccaggttggcacgtgtataaggcacaggggcaaatggctttggggtcctggaactggaaatggagacaggtgtgtctcaggtgtccctgcctccaccaccccctaagtgcacttgagacaggaccagtggtggtggttccagcccagggtcctgaagggtcccactggctctaggggagagccatggggacagctccccaggcgggaccctctactctccagctacccaggagggaccctctcctcctagggggcgaggccagctccaaagtgcttggtggctccccaggcttaagggaccagcctgccagggagggctggggtcagagagagaatagtaagatgagaacgaggagaagcacccccactagcacggcgatggcacaccactgtcggcggtctgggaacgagaaggtcaggggtcacggggagagggtaccacctacaacctgcccccaccaggactgacccctcccctgaggggactcaccactcgtcatgtgggatactttggccaacttcctgaggaccccgtccatgcgggactgggtgtggtccatctcttgggcgaaggcatccagcatgctgccaagaacaggatggcatcagccccagatggcccagacacaccagggtggccgagagcccctggcccacccccagggtcctggcctcacatgccctgctcgtccagctcttctccaacgcggccggacatgtgcttcagaacctggatgctcccagacaccatctccagctgttgatcctgttcatccatgatcagctgcagagcgaaggggtgggagatgctgttgaaaacgaccccagaaggccaggcgctatggcttatgactgtaatcccagcactctgggaggccgagacaggcggatcacttgaggccaggagttcgagaccagcctggccaacatggtgaaaccccatctctactaaaaatataaaaattggccaggcattgtggtgggcgcctgtaatcccagctactagggaggctgaggcaggagaatcactggaacctgggaggcggaggttgcagtgagctgagatcgcgccactgcactccagcctgggcgacaaagcgaaactccatatcaacaacaacaacaacaaaaagggaccccagacctcagatcagtctgcaaggctctcccctcccaagatccaccccgctggccccaaaacctgctgtgtggcctgctgctcctcgatgtagcgagatgtggccgagactgcgctggcatccagcaggtcgctgggtgacttctgggcagctggcttgcctgcgagtatctgcaggggcacacaacataggctcagggagagaccccaactcacagcggggcctgtggggcaaatccccacggtggtaagtcaggggggcagactctggggcaggacagcctgcattccccactcaccacttactagcaaggtgacccagagaccccatcatttggcttccttgtgcctcagtttcctcatctgtaaaatgcagagagcaggatggggcatggtagctcatgcttgtaatcccagcactctgggaggtggaggtgggcagataacttgaggtcaggagctcgagaccagcctggccaacatggtgaaaccccatctctactaaaaatacaaaaattgggccgggcacagtggctcacacctgtaatcccagcactttgggaggccgaggtagatggatcacgaggtcaagagtttgagagcagcctggccaacatggtgaaatcccgtctctactaaaaatacaaaaattagccaggcttggtggcgggtgcctgtaatcccagctactagggaggctgaggcaggtcagaatcacttgaacctgggaggctgaggttgcagtgagccgagatcacaccactgcactccagcctgggtgacaggttaagaccttctctcaaaaaaaaaaaaaaaaaaaaaaattaccgggtgtggcagtgcatgcctgtaatcccagctacttgtgaggctaaggcagcagaatcgcttgaacctggggggcggtggttgcagtgagctgagatcgcaccactgcatttccagcctgggtgtcagagtgaccttgcctcaaaaaaaaaaaaaataaaataaaatgggaagagctagaatccgtgtttcctgggttgaaatgaggatttaaagaattaattgatgggggacacttacagcagtgcccaacacatagtaatgctagtaaatgtcacattttactatttgtttatttttggggggattttagctgggattacaggcacctgccaccacatccagctaatttttgtatttttactagtgatagggtttccccatgttggccaggctggtctcgaactcctgacctcaagtgatccacctgcctcagcctcccaaagtgctgggattacaggcgtgagctaccatgcctggcccaacagatgtttgtttgtttgtctgagacagagtcttgctctgtcacctaggctggagtgcagtggtgtgatctcgcctcactgcaacctccacctcccgggttcaagcaattctcctgcctcagcttcccaagtatctgagattacaggtgatcaccaccacgcctggctaatttttgtattttttgtagagacagggtttcatcatgttggccaggctggtctcgaacgcctgacctcaggtgatccacttgcctgggcctcccaaagtgctgagattttaggtgtgagccaccgtgcccggctccaacagatgtattttagagtttggacttgaattcccccaaggcagcacatctggaaggcacgtgggcactgctatgggatgacaaactgggaggagcctcagtcccccaccctccccgaccccacgtacgcttatgagggagagagaaaggctggtggttctcaacatatgaaaaatatcaacagagaacaccaagagaaaaagtggactgacagaggtggttgggagaaacacagaaacacacacacacacacacacacacacacacacacggcaggcacattacagaggaaactagcagatattaggatatgaggggggaaaatgcagatacactcagaggccaagtgcacgcacccaaataggttaggtgcatgcacagatgaaaaggcgggggcggatcacctgaggtagggagtttgagaccagcctggccaacatggggaaaccctgtctctactaaaaacacaaaaattagctgggcatggtggcacactcctgttgtcccagctacccaggaggctgaggcaggagaattgcttgaacccggaaggtggaggtttcagtgagtcaagattgcaccactgcaccccagcctgggcaacatgccaagactccatctcaaaaaaaaaaaaggaagctggccgggcgcggtggctcacgcctgtaatctcagcattttgggaggctgaagctagtggatcacaaggtcaggagatcaagaccatcctggccaacatgatgaaactccgtctctactaaaaatacaaaaattggccgggcgtggtggctcacacctgtaatcccagcactttgggaggccgaggcaggtggatcacgaggtcaagagttcaagaccagcctggccaagatgttgaagccccgtctctactagaaatacaaaatttagccacgcatggtggtgggtgcctgtaatcccagctactcgggaggctgagacagaattgcttgaacccgggaggcggaggctgcagtgagccgagatcacgtcactgcactccagcctgggcgacagagcaacactccgtctcaaaaaaaaaaaaaaaaaaaaaaattagccgggtgtggtggcatgtgcctgtattacagctactcaggaggctgaggctggagaatcgttgagcccaggaggcggaggttgcagtgagccgagactgcgccactgcactccagcctggcaacagagtgagactgcatctcaaaaaaaaaaaaaaaaaaaaaaaaaaggaagttatgtgcgatggctcacgcctgtaatcccagcactttggaaggctgaggcaggcagatcagttgatgtgaggggtttgagaccagactgaccaacatgacaaaaccctattaaaaatacaaaaattaggccaggcgcagtggctcatgcctgtaattccagcactttgggaggctgaggcaggtggatcacctgaggttgggagttcaagatcagcctgaccaacatggagaaaccccgtctctactaaaaatacaaaattagccaggcatggtggcgtatgcctataatcccagctactcgggaggctgaggcaggagaattgtttgaacccaggaggcggagattgcggtgagccgagattgcaccattgcactccagcctgggcaacaagagtgaaactccatctcaaaaaaaaaaaaaaaaaaatacagaagttaccctggcatggtgacgagcacctgtaatcccagctacttgggaggctgaggcaggagaatcgcttgaacccaggaggcagaggttgcagtgagctgagatcaagccactgcactccagcctgggcaacagaacaagactctgtctcaaagaaaaaaaaaagagtaaaaggcaggcatgcgtcctggaaacaggtgcacacaggacaaatggcatggaagcagaaaggagataggtacacaggcccccagccctctcctgcaacaggaaaccagtatagacccagaggacacagtagagaggaacccacggacatatacacatagagaggttcaggtgcacacaccgagaaagtgcaggcaggtagacagcaagaagataactgcccacagagaggacgggcactgtcgcaaaagggacaggtgaacacgcacagagggatctggcttggttacccccaggggctcaggtgggcagggtgggtcaggaaggcttacctctctgttattcctctccaaaaatgctacggctgttgggctgaccatatggtccttcatttcctggaggtaaggacagcattagggaggaaagacactcaggctgggcgcggtggctcacgcctgtaatcctagcactttgagagaccaagccgggtggatcacctgaggtcaggagttcgagaccagcctgatcaacatggtgaaaccccgtctctactaaaaacacaaaacttagccgggtatcgtggcaggcacctgtagtcccagctactcaggagactgagacacaagaatcgcttgagcctgggaggcggaggttgcagtgagccgagattgcaacactgtactccagcctgggcgacagagcgaggctctgtctcaaaaaaaaaaaaaaaaaagaaagaaagaaagaaaaaaaaacacactcaaaccttcccccactccccgcctgcaggacctttcctgacctggactgcctctcgcatccgctccacgaacacctttctctcctgcaggtccccggctgggagcttgaacttgcctgggttggcttccactatacgtgggctgagagtcaagggtcaaggccggagccagatatcatccccgtccctaggggtccagccctacccgaaggtgggctgccaccgcaatgggctctcccatgccaccctctgccacaaagccccaggatatcgatggtctcttccaggtcctcgaggtcccactcgatgctgcgcaggccattccgcagctcattggtcgtccagtccagctcctcgcgtccgaccgccgcgctttcctgcaggagctcgcaccagcgctggtacagcccgcgggccgtgttcaccgccttctgcacctcgctgcgggcaggggcacggcgggcgcggctgggggcaggcggtcctcccgcctgcctctgcccccgactgcaaacccaaacgcatgggggactccggagacccctatatacccctgcgtgcgcctcccactctgcaccccgacggccttgcccagcccgccgggcacgctggggccggcacccgggcactggctggcttgggtacagagcaccctccgccctcccccgtcgttgtcactcaccctcggactacaaaaaaggggtcttcgagagacatgtcagtcccttcccccccaggccgaacccccctcccggcctgggttcgcgggctggttccctcccaaccgaggagaacgcgccgccacccccgcccccgtcacgccaccatcgagagccggaccgccaggggagaaagagaagcctcggaggcccgacgtgcggacacttccgccctctcctcagccatcttggttgtgggcagaggcagcttccggtgcacatgcccccgccccttagccctctcgtgccgcaccgtagggggcggtgtcggagttctgtctgggcctattcgggtccgagttcggaatttcggttcaaggcccagttcctcggattgttcctgcgcaacttcagtttcccttccaggcacgggcaatgtaaataatgatagcctccctcatctctggcggctgggtattatggctggggaaggggctcattcgattcgttgaagcttttcatggactccctgagctggcacctgggagatcgtcccatcccagggtcccgagtgtcaggtttggctagggtctgggggagaggtggtcctcccttctccctgcgggggcgcggtgaggagcgggcctgctcctccggggagttctgccgcattctcccaatctctttcctgagaagtggcggagttgggggcacttcgaggtcgccttggggcgaggtggtcgtgagggggtcccagatatgccagcagcggggggaggtcacctttgagaaagtgcgtggaggtgggtttcttcagaagcgcggagtctttctgggtgcgagcctgggggtagcgggtggtggctttgaggatggtctccaggggggccctctgtgtgtggggtctccgtctgggtaggggccaggaatatcagcggagggactcagggtcgtccctatgtgtgacagtggcgctgtgtgttggggagcttcgggaaagcactttttttgagtgatagggggcctggtctcccctggagggtgggcgggttatctgagggagtcctcggagggtcgcccccttgcgcgtcagagttgctgcgtggggtctcagagatagcgcctgggctggggaaatcattgtggggtctccgtggtaaggttagcggggtggggacggcctgcgtcttcggcaggtcgtcgcagtctggcaccatcgttgaatggggacgagtttgggaagggtattttaggggggaataacttttgagttcccagcgtgcgggggaagggcgggacgggagggtgtcccaaggcctgagaagatcagtgtggggcaggggtcaggaataacctgggagggggccttgtatgggggaaataattgggaagaggagagatgggatgaagggggcctcagcgggtcgtctcctgtgtatgcagggtcgttctgcagcgtctctgggagatggcgtccctgggagccctcaggtcgcccctacccgctgcggggtgctttcctggcgtcacgccttcctggcccctggagggaaggaagtgaaactctcctcttcccccacccggctggaatgcgagtcaggaagcctggggctccagcctgctccggctgcccgggtcggggatggggaggggcgtggccggagcgcaaagccccgcccctccgcgccccccccccggaagccccgccgccggccgctaaggcgatcacgggccctgtcctaatatgggcaaccggaagcggcccgcgcgactgccctacgtcactccgtccaaatttagttgtggaagtcagcgggcgctggtggcgggaaggcgccgcgagccagtgcgggcggaaagggggcggggggcgcaccaccccttaaagggcccgcaccaggaatgaatggagccattcgaacaattctgcatcctatttttggaggaagtggaattagtatttcttggagagacggcgcgtagcggagggtagggcggagattttctatctgctctgtctctgcattgctgggtttccagctcccaacctaaccccgcctccccgaacgcggagacggaactcggcccccttgtttggggggcggcagccacgtgttcacggggactgtcgtgcgcgccgggttcgcagccgtgcgagctctgaacccacccgtggagctcctgtcgcgggaaactgcgggggaatggcttggtacgaatcacgggaacccgtagcccggggcgggtcaccgcctacaagcaagggctggcgtacgctagagaccgaagagctggaggccccagtggccccctttcacagcagtagcaaatattgtttgtttagtaaatattggcctagtgactctgccttggtttccccacttgaaggaagcagatagaacagtatcctccgaggagtggaggctggggatcggtgaattattgataaaaggagagctcttaacctagcctggcacgttgtaagcgctgttagcatgattattggtgcagaaaacactcattagacacacctggtaaatgctaagaacagtggccacaggggatgttcaggctggaaccagggtcttcccctgtgtgaagggaaacttgctgcccacgacccactggggcctccagacgggagcatgtgggtaggccgtgagctccacccccggcccccctcccttgggccaaggcgctgatgcatcggcggggctcagagaaaggagcccacccagaaagctcagcgtggagtcgggggacgctcctcctcgccagggttcccgtcccctttccctgctgggtaaatcgcattctgtctctttaaggagtgtttggccgcgacgagttggaaagcccggatgcgtccttcggttgggcggggtgtctcagtgacgtcactgggggtataaaagggcctgggtggcgggcgcctgggcagagcgtcctagcagtgtcactgcgtgggttggtttgtgtagagaggcgtgagcgagcccgttgtccggagtgcacctgctgcctgttctgtccctcccgggagcccccgccgctgtcgccgtcgagtcgccatggaagtgcagaaagaggcacagcgcatcatgaccctgtcggtgtggaagatgtatcactcccgcatgcagcgcggtggcctgcggctgcaccggagtctgcagctgtcgctggtcatgcgcagcgcccgggagctctacctctcggccaaggtggaggccctcgagcccgaggtgtcgttgccggccgccctcccctctgaccctcgcctgcacccgccccgagaagccgagtccacggccgagacagcgacccccgacggtgagcacccgtttccggagccaatggacacgcaggaggcgccgacagccgaggagacctccgcctgctgtgccccgcgccccgccaaagtcagccgcaaacgacgcagcagcagcctgagcgacggcggggacgctggactggtcccgagcaagaaagcccgtctggaagaaaaggaagaagaggagggagcgtcatccgaagtcgccgatcgcctgcagccccctccggcgcaagcggagggcgcctttcccaacctggcccgcgtcctgcagaggcgcttctccggcctcctgaactgcagccccgcggcccctccgacggcgccgcccgcgtgcgaggcaaagcccgcttgccgcccggcggacagcatgctcaacgtgctcgtgcgggccgtggtggccttctgaggaccccgagcggcgctgccggagcccagagcgcgcgtcgaaccgtcggcccgagggcgcagacctgaggcgaggccacccccctccatcctgggggaagcgcccgcgaaaaccgtggagagaagccgccgcccgggctgctgagaggcccggagagggactctgtccccggggagccatcgccttcagtgtgcagggacggcaccgaggagtctgagccgggggcgcgggcgccttccgcagagacctgcgcccacaggtgctgtcttagtggactgggacgtgaacctttcgctctccttctggactgggagaagggaggcttgggtgttgtgttttttgttttgtttgtttgtttgtttttaaagatctcctcagggtcggacttcattttgtactgtgggctgtgctggccctttcaaggtttttcaagagttggttttgcgtttccaacctcggagaattccaggcactccccttccccctccgctgacatacttgtataagcggtcatcgttgcgtcatggggcaggcgtggggagcttcctgtcgccttgcgtgggtgtggggcctgggaggaggtcctggggcgtgcacccgccctgggcagtggggaggagagtggcctgagttacttcacccccgcgtgctgctggttaatgtcccgcgtctctgcaccttcgggtgggagcggggactgatctactttcacattctcaagtttttctcatctgcattagaggtgcccagtaggttcccaggttccagcgtgcccctccctcagacacacggacacaatcagccgagaagttcctggtctgaatcacgagaatgtggaggggtggggggtgtcagtggaaaggcataaggctgagctgagaccagttgctggtgaaactgggccaatctggggaggggaacatccttgccagggagtttctgagggtctgctttgtttacctttcgtgcggtggattctttttaactccgtctacctggcgttttgttagaaatgtcagataggaaaataaaaaccatttgagtaaaaaagccggtgctgtctggttttctgctgtggtgggggaggggcggggttaaagcgtcaggggctggcagccgctcgctggggccccaagaaccggtctgaccggttaccacgtgggcgagagagggttgggcccccttttccttgcccgggcattccctaactggtggagccccgcctcccccagatttgggggttcccttgaaattgtcctacaactccgggacagggagatcggggctttctgagttgagacaatagtgctaaacacactgccccaagcggagctggggatcgattgcacgcactttgaagccttgaaaggtggtagatctcgcccccaccccctagaccaaactgaatcagctgtggccggggccctacagtatcaggtggagctgagcgggtgagctttgaagggctctttagtccccagttcccgtatcttcctcgaggaatcgttgtgtgtctcaggcagggacgtgcagcctcagtttcctcatctgtgaaatgggcctctaagcagcttctccacccggcattaggtttttaaaaatgcccattagagccctagttattttcttgggtcactccccagctctagaataaccaccccgaaacgagaaagccctttcaatataccccacgtaggtttaagagtggggttgtgggcgttgccccagggcgaagggagggggcctgtcgggaagacaaaggagtcgcaggtgcggggagtggtggcggcggcaggcgccgggaaagcgctcgccccgccccgccgacggctggctctgccgccgcaggcttcccatgaccccaggggaactgaccccgtggccacagggtagaaggaggggcaagccggcctcagaacgtctgctggtggaatctgggagctttggctcccctcccgcccaacccacaccccctttcctctcctgtgtggattgtgaaggagagcttctcaccgttctccagccaagctcgcccccacggctgcctgattccttcctgggaacacgtggggggacttttaaaaggcgccacctactccgagtcctgacccacccaactctcccaggggacgtgggggcactggagccccacaccgcaggcggtagctcaatgcacccgcgtcggagttcctcccccgcgagcgtggcaaggctcagggaagtcccgggcccctggggagggggccttgccgcgcatcctgtcgcaggaaccgccgggcccttccttccgcgggaagcggcttggccgacccccgcccccgcccgggcctcttgggggtttccggtgcccggccaccgtggggctggggactgaaagtgatgggactgaagatggggctggaacaaacacactacagacacatccccttaagacacacccatccccaagaccccactggacccatcagaaaaggcagcattgaaccttgtcacagcaaataacattggtgaggcctggactaattgattggacaatggctgtgaaaactaaaaaggtcacccatcctgtgaccagcaggttccagcagggaaccccaagcctgctgcaggagactccagaaaggtgtttgctgctggcttgtactaaattggcacaaactgcaaacagcacagcctacatgcccatcctcccagatgggtcctccccagaggataaaaggccggagccagacagaactacacacacaggccacacagataattcggtaccagaaacatgatgctgagtgacaaaggccagctgcagaagtcaggtaagaagcacatattctgggccgggcatggtggctcatgcctgtaatcccagcactttggaaggctgaggtgggcagctcacctgaggtcaggagttcgagaccagcctgatcaacatggtgaaaccccatctctactaaaaatacaaaaattagctaggcaaggtggcaggcgcctgtaatcccagctatccgaaggctgaggcaggagaatcacttgaactcaggaggcagaggttgcagtgagccgagatggtgtcactgcactccagcctgggctacagaggaagactctgtctcaaaaaaagaagaagaagaagaagaagaagaacatattctggagggagggaaacaaccaggtctactttcgttttcttgctatgcatccttgagtgagtcacttgacctctctgggcctgtttccccaaccgtatactggggacaataatagtccctgccttttaggtttgttgtaaggattgagattacacatgtaatccttacaacaaacctagcagagtgctggcacgtagaaaatgctaaatgtgctgggtgccatggttcatgcctgtaaccccaaaaatttaggaggctgaggtgggaggatcacttgaggccaagagttttcagtgcaatcatggctcagtgtagccatgtagcctcgaactcccagactcaagcaatcctcctacctcagcctcccaagcaggttggaccacaggctcaggcaccatgcacagctaatttcttttttttttctttctttctctttttctttcttttctttcttccttccttctttcctttttctttctttcttttctttccctccctccttcccttcctttcttcctttctttcctttctttctttcaactagagtctctctatcacccaggctggagtgcagtggcttgattacagttcactgcagcctcgagctcctgggctcaggcaatcctcccacctcagcctctggagtagctgggactacgccaccacacccagctaatttttcttttttttcttcttctctctcttttcttccttgtctctttcttttcttttcttttttgtttttgacagagtctcgctctgttgccaggctggaatacagtggtgcaatctcggctcactgcaaccctggcctcccggattcaagcagttcccctgcctcagcctccgaagtagctgggactacaggcgcacaccacgacacctggctaattttttttttcccaccggttgtcaaatgaccctttattgaaatatttttctttgtgcttcttaactagctgggcatttcacagcaccactgtgggtttttctggttttttggggtttttttttttgagtcggagtcttgctctgtcgctcaggctggagttcagtggcgcgatctcggctcactgcaagttccacctcccaggttcacgccattctcctgcctcagcctcctgagtagctgggactacaggcgcctgccaccacgcccggctaatttttttgtattgtatttttagtagagacggggtttcaccttgttagcaaggatggtcttgatctcctgacctcgtgatctgcctgcctcggcctcccaaagggctgggattacaggcgtgagccaccgcgcccagccatcaccactgttgatgtcatctatgatgtcacgagggtggcggccatcaacattacggcctacagactgggcagtccccaggatctctttgatggttccagagagttctctggctaaagatcggtgccacatctgtcgagtaatgttgacgatctcatcaaaagtgatattcccattgtgtctaatgtttttctgtttctttctgtctcttggtggttccttgagggctttaatgatcagggcagaggcagaaggcaccacctcaatctgggcctgtctgttctgaatggtcagtttcactgtaatcctcaggcccttccagtcaccccattgccttggcaaggtcattaccaagcttttttggagacagacccagggggccgatcttgggggctagtgcagaagtggcacccccttcaccccgagtgcacctcaggtatacaaatttgatctcgttggggttgaactttggcagcatggtggaggtgattggttttggaaaaacctggattctggacaaccgaagaaagctgcaccttgggctcctccaagccgaaagcccagctaattttttttttctttttgacacgaagtcttgctctgtcaaccaggctgcagtgcagtggtgcaatcttggctcactgcaacctccacctcctgggttcaagcaattctcctgcctcagcttcctgagtagctaggattacaggcacccgccaccatgcctggctaatttttgtatttttagtaaagacgaggtttcaccatgttggccaggctagtttcaaactcctgacctcaggtgatccacccacctcggcctcccaaagtgctgggattacaggaatgagccaccgcacctggccgaaattttttgtattttagtagagacggggttttaccatgttggccaagatggtctccatctcgacctcgtgatccgcccgcctcagcctcccaaagtgttgggattataggcatgagccaccgcgcctggctctttcttttctaacagggtcttgctctattgcctaggctggagtgcagtggcacgatcttggctcactgcaatatcttcctaacaggttcacgagattctcccacctcagcctcctgagtagctgggattgcaggtgcacaccactgcgcctggctaatttttatattttttgcagacacagggtttcaccatgttgcccaggctggtctggaactcctgagctcaagtgatctgcctgcctcagcctcccaaagtgctgggattacaggcgtgagccactgcacctggacgtatttattttttacttaggatttgtgccctaactcagaagttaattctgttaattctaccaatgtccagcctgagcctgaatgagtgaatgaggttgttttgggtaaacaggtgttacatgcttaatgtttatcatctcattaaatcagtggcttctacatgactcttagaatttctcaaacctcagatggttgaggggtcaggatatttgtgatattttcataactactgtactattattattatcatttatagacagggtcttgctatgttgcccaggctggagaacagcagcgccatcatagctcactgcagcctccactgcctaggctcaagcagtcctcccacctcagcctctgcaggagctgggaccgcaggcctgtgacaccatgcccagctaactgtattcatgtaatagttttctttgcgttaacccacttattaatcactctccctatttagaaagtaacagttttttaaaaggttacaatgaaaataaaacaatgtcaaaagatcctgctgaaacagtaacaggtttaatagtttcaaagagagattagccagccttaacgacacattgtttccaagggaagaaaactatgcttgggctgagaagggggatgcaagttgacaagggagaaatttggagagatccagtccacgttatttaaataacattgaattgggctgggcgaagtggctcacgcctgtaatctcagcactttgggaggccgaggtgggcggatcacctgaggtcaggagtttgaggccagcctagccaacatggtgaaacatcacctctaataaaaatccaaaaattagccgggcatggtggtgagtgcctgtagtcccagcgacttgggaggctgaggcaggagaattgcttgagcccgggaggcagaggatgcagtgagtcaagatcacaccacggcactccagcctgggcaacagagtgagactgtctcaaaaaaataaataaataaataaataaccttgaattattttgccacactgtcccagaatatggaaaattctgcttctggaagagggacaaactcctatgatgatctgcaaggccctgcttgatctggggccatcccatctctggatgaatcatgcatcaccctctggccacatggacctgctttttgttcctcatacttccacagccttctcagccacatggcctttggatatgccgtgacctcctgaagatctttcagcttccttgctcacctagtgaagccagctcagctcaaggggcaaatcctcagggaagtgttccctgtctaaccctcttttggcctaaggactgctttattttattttttatttttattttttgagatggagtctctctctgtcacccaggctggagtgcagtggtgcgatctcagctcactgcaacctccacctcccgggttcaagtgattctcctgcctcagcctcccgagtagctgggattacaagctcccaccatcacacctagctaatttttgtatttttagtagaaatggggtttcaccatgttgtccaggatggtctcgatctcctgatccgcccgcctcagcctcccaaagtgctgagattacaagcatgagccaccgtacctggcctattttattttattttaattaattaatctatttttgagacagggtcttgctttgtcgcccagactggagtgtagtggcatgatccaaggctcactgcagcctcaaagtctagtgcttaagggatcctcccatctcagcttccagcatagctgagaccccaggcacacaccacgatgcctggctaattttttattttttttgtagagatggaatttccatgttgcccaggctggtgttttttatttatttatttaaccagtctctgatgggaggcaagacccctatatttgacactcggatcaagagctactttatttaaaacatttggccaggcatggtggctcacgcctgtaatgccaacactttgggagaccgaggcaggaggatcacgaggtcaggagttcaagaccaacttggccaataaggtgaaaccccatctctactaaaaatacaaaaattagccaggcatggtaacacgcgcctgtagtcccagctactccagaggctgaggcaggagaatcgctggaaccttggaggagaaggtttcagtgagccgagatggcaccactgcactccagctgggcgacagagtaagactctgtctcaagaaaaataaagagaccaggcgcagtggctcacacctgtaatcccagcactttgggaagccaaggtgggcggatcacaagttcaggagctcgagaccagcctggccaatatggtgaaacctcatctctactaaaaatacaaaaattagccgggcgtggtggcaggagcctgtatcccacctcttgggaggctgaggcaggagaatcgcttgaacccgggaggcggaggttgcagtgagccaaggtcaagccacttcactttagcctgggcgacagagcaagacttcatctcaaaaaataataataaaataaatttttgcggggctgggagtggtggttcatgcctgtaatcccagcatttttggaggctgaggtgggcggatcacttgaggtcaggagtttgagaccagcctggccaacatagtgaaaccccatctctactaaaaatacaaaaattagccaggcgtggtggcgcgcacctgtagttccagctgctcggaagggtgagatgggagaatcgtttgaacccggggccggggggctgaggttgcagtgagctgagatagcgccaatgcactccagcctgggtgacagtgagactcagtctcaaaaaaaaaaaaatttttttttgttaatacttatcacaagtgcaattttacctttgtagaattaaaccgttgtttctgagttagtttcctcttgtagcctactgcctccaagtctagcagatggttaagcggtttttgtgaatgaatgatgcctttgcaaccttcgtttgagatctgtcctcttaacgtccactgtgtatatatgaggaaacaggcccacagagtttcgctctgcaagacagcaagtaaaggacagctctagtcgggtcctctatcccgaagcctcctccccactctgccctgccctgccgtgcaggacccaaaggaagggcgccccagttcagcctctgtagatctgggaaagggccgggccacaggtcgggaccaatccagaagcagcacccagaccggtttacccggttccaggaccttgggcgaagtccacccgcccgagggcagggacgacgcaggccacgccgcggcccagttgctagccaggcagggtggggatttgatcttgccaaggaaatgtgagcgggaggccgagcgttggaggtgggtaagtcgtcactatgcagggcggagccatcctgtgtctatcacgcccaagggcggtgcatgcaaattgactcccgcatttggcttttccccgggctccgtctccgcgcgctgcaacccgcgacttccaagaactccccgcgtagtcagctgcccgggccacgccccctttccggacccgccctgcccgccccagggaggcgggggcggagcttgcggcccagcgggaaggcggaggcgggggtcgcgcccaggtcccgggggcgtcagaggcaatgggaagtcgtggcttctgcaccgcccttgggggttcggctcccaatcagggaaaaagggccgagagaatgaaagagtaatgagacttgcgagtttgaggctcacactactctctttgggttgggggttgctgaagcctccacgtgtattcagggagccccgaacctcacacctctgtccaggggagctcagaacccgccgtgttctggaaagcctacaccttccccggttttttagtgtctaggggagcccacaaccctcacagccgtgtctagtagcgctcagatccacacacctgtgtttgggggagcccagatcttctctacctgtgtccagatgagttcagagccccgacgtttgtccaggaaagcccacctctgtccagaagcgctctgaccaggacctttcctgtttcctgaggctcagcctagggggtcatcccacccaggtctgtgttaaggggagcttgtgtctccccaaacatgtccaagtgagctgagctcaggagctgaggcctccccatatcgtgctccccgcctggccctttggtgaatccctttctcagaagaaaccctcaggggccctagccctgctgcccttccctgcactgtcttcgagcctcctggcccaattggcccctcccccagtacactgttgagtcttagttaagacataatcccagcattcactgtcccccatcccccagctctcccgcacctcggcggctggccgggcccccgggagtgccgtcatcccagccggctggccacccgactggcaccaattaatttcctcctcggcctgtccacccagggcctcggcctgtctggttgccagctgctcaccctcagccagcccgccccctcgggctcccagggaattgccaacagttctcctccttcctgcaacccccccacccccaatccaggccaccccacccagcacagttaatcagaaaaagctgacagttaggacctggaggagtgatctgaaatcagatggaggaggggtgggatgttaaactttcggacccagggatgcttggggtggagcgggggcatggctggagggaggcagaggatccagttttacttaagaaccccaaatcaaaggcttgtagcttccagatggggactgcagggagggctgaccccctcccgcatacaccaggcgggcaaggtggagcgcccctcctcggaaattgccccccgcccaagatgcgtcagtgacagctgtgcctcctcagcccgcacccagccggtttccttttcctgtgcacactctcccgatgggctggccttcagcctggagagactccacggccccttggaaggggctccccagagggtcttcctggacgagggggaggggacaggctgaagaacaatggggcttctgtggctgcaggacgccaggcacttcctgttaaccctttcctcggggtgcagctgcagggagcacctcccaggtcccgccttgtgggaaggggcagaggcagcctgaggggaaatcttgttgcgggaattaactgttgtgttaattgaggcttttgtgagtgtacttaggaggggtgaggtgaatcacaccttttctcacttgatggagttacagggctttctcctctattgctgagggctgtgcagtcagggacggggcagggctagcctgggagaagcctgtgcactgagctcagagacgttcaaggcttttccccagataggttacaccaggatctccagggcatggacagggatggggtcggggaacccaggcatcctaggtgaatccaaggaacagccatgtctgcaaaccactgttctagctgccttgctgggcttacctaggggccacgatccctgagtcagttcccttggcagcctgggtctcagtttcccttggcttgtagaagttctttcaggggcctaccaagaggacacggcagtctaggagctccctaaggggcaggagtgggctgggagccttggaaacggtttgtttctcctgggagccctgagaagtcatgttgggggaattaactgctgtgttaattgaggcttcaagccaagtcccctctgtttacacagagagtctgagaaatgccctcggaagattccgagagcctccaaaggccccagagactttgcttctgccctggaggcttctggttttttacgggtaagataacctctcccatagtcaagagagagacttactgatgcttatggcagccccaggccctgaaggtatgctgtacttggtcacttccgtgcatttgtttaatcctcaccacaagcctgggtcaggataaaaagtaggcacttcactctttttttttttaggggtcttgctatgttgcccaggatggtctttaactcctgggctcaagtgatcctcctgccttcggccttccaaagtgctgaggttacaggaatgagccaccgtgcccagcccagccctaaagtaggcctttttttccccccgcgacggagtttcactcttgttgcccaggctggagtgcaatggcacggtctcagctcaccgcaacctccgtctctgggttcaagtgattctcttgcctcagcctcctgagcagctgggattacaggcatgggcaccatgcccggctaattttatatttttagtagagaggtggggtttcgccatgtgggtctcgaactcccaacctcaggtgatccgcccgccttggcctcccaaagttctgggattacaggtgtgagccaccgcgctcggccttttttttttttttccttctgaagtggagtcttgttctgttgcccaggctggagtgcagtgacgcgatatcagctcattgaaccctctgcctcccaggttcaagcaattctcctgcctcagcttcccaagtagatgggattacaggcatgcaccgccacgcccagctaatttttgtatttttagcagagatggggattcaccatgttggccaggctggtcttggaactcctgacctcaggtgatctgcctgcctcagcctcccaaagtgctgagattacaggtgtgagccactgtgccccaccaggtaggcactttcattagccccattttacagatgagggaactgaggggaactgaggcacagagtggttaaacaaagtgtccagggttaccctgtccagtaaagcaaagcccattgacattcttcctctcctggatttttttttttttttgagatggagtcttgctctgtcgcccaggtgggagtgcaatggcccaatcttggctcactgaaagctctgcctcccaggttcaagcaattctcctgcctcagcttcctgagtagctgggattacaggcgtgcaccaccgtgcccagctaatttttgtattttttttttttttaagtagagacggggtttcaccatgttggtcaggctggtctcgaactcctgacctcgtgatctgcccgcctcggcctcccaaagtgctgggattacaggtgtgagccaccacgcccggccggatttttcttcttttcttttcttttcggtggggaggaggagagtgtgaggacctttgtcctggttggtgaacttttgcttaaacccagcttctatctctggttctcagataaggaaccagctccttctgggagctgagagccgcaccccaggtctccttgccactcctgggctacctgttttctctttcctcatatccagggctgatcactcaccaggttccctcttagaatcatttgccacttcacttcattttcctctcttctcccctttctgcaggatgaacacttccccaggggtcaatctgtgcacgctcagtccaggggctgggtaaagacaaagttttttgtttgctgttgttcacttgtttatttaaatttatttattttgagatggagtctcgttctgtcacccaggctggagtgcaaggcgcgatctcggctcactgcaacctccgcctcccgggttcaagcaattctctgcctcagcctcctgaggagctgggattacaggtgtgcaccaccatgcccggctaatttttgtatttttagtagagatgtggtttcaccatcttggccaggctgatcttgaacttctgacttcgtgatccacctgtctcagcctcccaaagtgctgggattacaggcgtgagccactgcgccccaccctcacttgtttatttacttgttttgtaaacattatttactgagcatgatcaaactgctagactggagaggctgctgcaatctcctccctctgcccccgccatttcctggtacccatccttgctggtggtgtctgcaatcagcggggccctggctgagttcacgggaaaggaaatggctcattgcttcagcctttagaccggggggcagggagggcctgtcgggaggccgcctagtcaggggcgtgtcagaggccagaggggccggggcccagcagctggggcttggtaagctctggagcctgggctccaggccagctcgctgccaacctccacctgagaccaccccacccccaacccccttccttctctcccctgctgccgaggcgcgcccttccggagtgaaactttggtttctcacgacccggaaggcttgaagcaaacctgcaattactcactgcctggtctgtgcgggctgcagctctcagactcaggatgaggtggcggtaggtggggtggggctcttgggacccttttaccccttcgtgctgctggctgggggaggccactaaagtctgcgcgctgccttccacgcgttctccagacactttccaaatccctgcggacactaccttataaacagatactggaattttcaaagtactgtcatgctgtttgggaccagaaattccctcccatgagggttggatatgaagccagtttggagggggaagctgagggtgcatgcccctggatctaccaaagccttctcttcagtctgggaggttttttttctttttctttttcttttttgagacagagtctcactctgtcgcccaggctggagtgcagtggtgtgatctcagctcactacaacctccacctcccaggttcgaatgattctcctgcctcagcctcccgagtagctggacgacaggcgtgcgccaccacacctggctactttttgtatttttagtagagacagggtttcaccatgggtttcagagggtgcagtggctcacgcctgtaatctcaacactttgggaggtcgaggcaggtggatcacttgaggtcaggagttcgagaccagcctggacaacatggtgaaaccctgactctactagaaatacaaaaattagctggtggtggtggcatgcacctgtagccccagctactcaggaggctgactcaggataatcaggaacccgggaggaggaggtttcattgctccagactttgagactccatctgaaaaaaaaaaaaaaattaagccaggcaaagtggctgatgcctgtaattccaaagctttgagtggctgaggtgggatgatcacttgaggctaggagttcgagaccaacctatgcaacatggcaagaccaccacacccccatctctgcaaaaaattagccaggtgtggtggcgcacacctgtagtcccagctactctagaggctgaggcgggagggtggcttgagcccaggagtttgaggctgcagtgagctatgatcatgtcactgcactccagcctgggtaacaaagcaaggcccagtctcaagaaaatcagttatttttgcatatgtatggcgtacataagaacatttgttacatgtctataatgtaacctctctctgctttgctttgcagctctggcaggggcagggcagcagtgctatgatgaggccacttgtaattgggggtgttcatgggagggcctttgttctctgagcactgagtgggcactgctgtatctccatatgcctgggatcctcattggttcccctcctttctcccaggcttgtgcctctttcttttacttgactttttttttttttccacccaggctgccgtatagtggtgccatctcagttcactgcaacctccacctcccaggttcaagcaattctcctgcctcagcctccccagtacctgggactacaggcatgtgccaccatgcctggccgatttttgtatttttagtagagacagggtttcaccatgttggccaggctgatctcaaactcctggcctcaagttatccattagcctcagcctctgaaaatgctgggattacaggcgtgagcccggcctttcttctttttcttttttcttttgtttgtttttttagagacagggtctcactctgtcacccaggttgcaatgtagtggcatgatcatagctcactgcagccctgaactcctgtgctcaagtgatcttcccacctcagcctcccaagtagctgggactataggtgtacatcaccatgcctggctaattttttaattttttttgcagatatggggtcttgctatgttgctgaggctggtctccaattcctgatttcaagtgagcctcctgcctctgcctcccaaagtactgtgatgagctactacgcctggtcattgtccctctttctcatgactctctggacatccctggggtggagggtggggcaggcacacacatccctcaacttcccagtggttccacgatgactaagccagccctgtccctgaggctgggagtctggagctaggatccacccccatggcctcatatcccaaccttgagcctgggtttctggtcagactggacgggctagctcggtctccttaactctcagagttgccttgtccaggcccagcgggtcccacacagccaggcacaccccaccccacagggctcctgggaaattctctgccccaccctcaggctgcctcagacagactgaggttacctgtgattgtcccagataacccgagtgagcccatcctctgctctgggtggctccctccctggcagctgacctgtaaattttgaaaagatggggacaatgctcagctaggagggatgctcctgctgtcttccctgctggcctggccactccccagactggacaggtcccttggcagctcttcccagcaacccaggcagccccaagccccctcttgcttggtgttccaggccagtgagaatctcacttcttctccaaaactttgtcttccaactcctgttttgttgtgttttgtttttttattgaaacagggtctcattctgttacccaggctggagctcatggcatgatcatagctcactgcagcctcaaactcctaggctcaagcaattcttcccacctcaccctcctgagtagcagggactacagatgtgggccaccatggtcagctaatttaaaaagtttttttcttaggccaggcatggtggctcacgcctgtaatcccagcactttgggaggccgaggcaggtggataacaaggtcaggagttcgagaccagcctggccaacctggtgaaacccctgtctctactaaaaatacaaaaattagccgggcgtggtgacaggcacctgtagtcccagctgcttgggaggctgaggcagagaattgcttgaacccgggagatggaggttgcagtgagctgagaacactccactgcactttagcctgggcgacagagtgagactctgtctcaagaaaaaaaaaattatatatatataaattagccaggcatgatggtgagtgcctgtaattccagctccttgggaggctgaggtgggagaatcacttgaacctgggaggcagagattgcagtgagccaagattgctccactgcacaccagcctaggtaatagagtgaaactccatctcaaaaaagaatttttttttttcagagatggggatctctctgtgttgcccaggctggcctcaagcaatcctcctgcctcagcctcccaaagtgttgggatgacaggcatgagccactgcgcccggcctgtggtttctccatgtggggccagatcactctttgtgcagggagctaccctgtgcatctttgatgttgagtagtagccctggcctcaaccctgtgccaatgaaagatgtctccagatgttgccaaatgttggggtggggtggggcgcagccttgccgcctgcttcacctgttctacctgtccatactcataccaacctgcaaagtaacttagaccgtgtgttttctttttctttttttttttctgagatgaggtcttgctttctcccaggctaaagtgcagtggcacgatctcagctcactacaacctctgcctcccaggttcaagcgattctcctgcctcagcctctcgagtagctgggattacaggcacccgccaccatgcgcagctaatttttttattttgagtagagatgggatttcaccatgttggccaggctggcggctcgaactcctgacctgacctcaggtgatccacccgtctcggcctcccaaagtgctggattacaggtgtgagccaccgtgcccagctggagcatatgtgttctttttttttctttctttctttctttctttttctttttttttttgagacggagtcttgctctgtcacccaggctggagtacagtggcgccatctcggctcactgcaagctccgcctcctgggttcatgccattctcctgcctcagcctcccaagtagctgggactacatacaggtgcccgccaccacacccggctaatttttttgtatttttagtagagacagggtttcaccatgttagccaggatggtctcgatctcttgacctctagatctgcccgcctcggcctccaaaagtgctgggattacaggcatgagccactgcgcctggccaggagcatgtgttttctcatcttgggcctggatcgagtccttatggtggaggtgatctgcgggttccagaatcttgggaagggattggtgagaccatagcatggcccattgcaccgtccctctacctggagtgaggggtgccagcctcccatttcctggtgggtgggcttgctggatggcagcctgaggtgggtggagtcaggctgccttgttctatttcctggttcccagggttgggtggtggcaatggtggccccggagccagagggcttggggtaccctgatcctgcctccggatttactgggtgggtgctagggtgtgtgctccaagaccgatggcccctgtgggcgtggaggagaaaccagagactcaagcagatctccctgcctgccttctgccctcatgtcccacttcaccttggctctaggccaggggctgccagaatggtgactcagagcgactgagaagaggagagaaacagaatggaggtccttatcatcctccaatctccgccatcccagcatccccataaaggtcaggacccttgaggccacatgtcaagaccatccacactgccctctcctgcttcctcctcctctacccgccctctttcagtgggatttttttttccgggtaccacgctagggcaggaaggcagaagtgagcatggggcgtggaacgtctctgaggttggaatatatttaggccaggagaagagtgtgtgtgtggtgctggccaggccctggcgccggctcggcgggcttgaggagtgatggtggggggccctgagccagtgtggggatgctcctgccttctccctttttttttttttttttttttggttttgagatgtagtctcgctctgttgcccaggctggagtgcagtggtgcggtcttggctcactgcaacctctgcctctttggttcaagtgattctcttgcctcagcctctggagtagctgagattacaggcatctgccaccacgcccggctaattttttctatttttagtagagatgaggtttcaccatgttggccaggctggtctccaactcctgacctcatgatccgcctgcctcggcctcccaaagtgctgcgattataggtgtgagccaccgtgcctggccaccttctcccttttaaagacagcctgtcagctttggggaggaggagtgggaatcactaggcccccaccaaggctgaggcaggccctgtgtgggccagatacatttagcatcttcaaaacaaaccagcaagactaacatcaggatcacttacagctgtaaacacaaggcccagagaggttaagtggctttcccaaggctgttcaggaaagaggtgatgatggaagggttctcttgctggcccggctggctgccaccattcatgcacgcagtgttcattcatgcaacacctttgtgggtacagcctagcctgtgccagcccccaacaacgtgcgggagaacaagaagccaactggacccaggtcggcaaaccgcagcccataggtggcattcgtctgttgtctctgcacggcccttgggctaagaatggtttttacatttttaagtggttgaaaacaaaagaataagagtattccatgatacataacaattatatgaaattgcaattccagccttcatgaattcagggtacacaggttacacccatttgagtccacattgtctgtggttgccttttcgtgactgtggcagagtggagctgttttgacagagaccctgcaaagctaaacaactttcctatttgtcccctcctcccctgtccccctcacacttttttttgacagagttttgctcttgttgcccaggccggagtgcaacagcgcaatcttgggtcactgcaacctccacctcgttggttcaagcgattctcctgcctcagcctcctgagtagctgagattacaggcgcctgcaactatgcccggctaatttttatattttaagtagagacaggatttcaccatgttggccaggctggaccggaactctgacctgaggtaattcagccgcctcggcctcccaaagtgctaggattacaggcgtgagccaccacacctggctttttttttctctctctctcttttttgagatggtgtctcactctgtcgcccaggctggagtgcagtggcgtgatttcggctcactgcaacctctgcctcccgggttcaagcgattctcctgcctcagcctcctgcaacctctgcctcccgggttcaagcgattctcctgcctcagcctcctgagtagctggaattacaggcgcgtgccaccatgtctggctaattttttgtatttttagtagagacgaggtttcgccatgttggtcaggctggtctggaactcctgacctcaagtgatcagcccgttttggcttcccaaagtgctggaattacaggccagagccaccacgcctggccatgcccggctaatttttttgtttgtttgtttgaggtagagtttcactcttgttgcccaggctggagtgcagtggcatgatctcggctcactgcaacctccacctcccaggttcaagtgattctcctgcctcagtctccctagtagctgggattacaggcgtccgccaccacgcccggctaatttttttgtatttttagtagagacgggggttcactatattggccaggctggtcggcaactcctgaccacaggtgatccacccgcctcagcctcccaaagtgctgggattacaggcgtgagccaccttgcccagccggagcatgtgttttctttcctttttttttttttttaagagacggagtcttgctctgtcacccaggctggagtgcggtggtgggatctcggctcactgcaacctctgcctcctgggttcaagcaattctcctccctcagccttgtgagtagctgggattacagacgtgcaccactatgcccggctaattttttttgttttttgtattttagtagatacggggtttcaccgtattgcccagggtagtcttgaactcctgaactcaggcaatcctcccgcctcagcctcccaaagtgctaggattacaggtgtgagccatcacgcctggcataaaataataataataataataataataataataataataataataaaattggctgggcttgatggctcattcctgtaatcccagcactttgggaggttgaggcaggcggatcatgaggtcaggagtttgagaccagcctggctaacatggtgaaacctcatctctactaaaaatacaaaaattagccaggcatggtggtgggcacctgttaattccagctactggggaggctgaggcaggagaatcgcttgaacccgagggctggaggttgcagtgatctgagatcgcaccactgcactccagcctcagcgacagagcaagactctgtgtcaacattgttttttttaggccaggggcagtacctatttccagcactttgggaggcccaggcatgaggatcgcttgagcccaggaatttgagaccagccagggcaacatggagaaaccctgtctctagaaaatatacaaaaaattagctgggtgtggtggcatgtgcctgtggtcccagctacttgggaggctgaggtgggaggatatgccaagtccaggaggtcaaggctgcagtgagctgtgatcacaccactgcactccagcctgggtgacagaagaagaccttgcctcaaaaaaaaaaaaaaagttttttattattatttttttttctttttgagacagagtctcgctctgtcgcccaggctggagggcagtggcacaatctcagctcagtgcaagctccgcctcccaggttcacaccattctcctgcctcagcctcctgagtagctgggactacaggcgcccgccaccacgcctagctaatttttttgtatttttggtacagacagggtttcaccgtgttagccagaatggtctcaatctcttttcaccttgtgatccgtccgccttggcctcccaaactgctgagattacaggcatgagccaccatgcccagccttaatttttaaagataggggtctcactatgttgcccgtttatctgagctcaagcggtcctccagtgttagcctcccaagtagctggactcaggtttttattttaacaatgtaagactatattatccttataagaatactttaaaaaaaatggataatcctcccagactccctgatatgggagttgaaggggcagatgtggggcggagggagaggggagctggtgttggaaccaggctggtttgctaaatccagcctgccacctgtttctgcacagcctgcgagttaagaatggctttttcatttttaaatggttgggaaaaaagaatcaaaagggaaatttcacgacatggggaaaagtatatgcaattcaaattttagtgtccataaataaagttttattggcatggagccgggctcattcatttaccctgtatccgtggctgcttttacgcttcaccgcagaattgagtcattcaacagactgtctggccctcgaagctgaaaatatttactgtctggcccattggagaagaagcttgtagacccctcttctaaggggcctgagaccctcacttcaatctgtccctgattcaggccgtcccaggatcatttcttcattggcatggaaaagacgttggtgtgatttggaggcaggaggactcgctgaggactgatccttaacactggatgccccctggggaggaggggcattggggtcttcaaggtgaagcaggattgaggactgaggtgggcaggctggctatgggcacggcaggagcaaaggccaggaggccagacctgtgcctcaactcaagctgccccgctcagttcgagtccaacttcggcaacatagcaaaaccccgcctgtacaaaaaaattagccataggccgggcgcggtggctcatgcctgtaatcccagcactttgggaggccgaggcaggtggatcgcgaggtcaggagatcgagaccatcctggctaacacagtgaaaccccgtctctactaaaaatacaaaaaaaattagctgggcatggtggcgggcgcctgtagtcccagctactcgggaggctgaggcaggagaatggcgtgaacctgggaggcagagctggcagtgagccgagattgcgccatgacactccagcctgggcaacagagcgagactcagtttcaagaaaaaaaaaaaaaaattagctgtgcatggtggcacgtgcctgtagtcccagctactcgggaagctgaggtgggaggaattgtttgagaccaggagttccaggctgcagtgagccatgattgcaccactgccctccagcctgggcaacagagtgagaccttgtctcttaaaaaaattaaaaaaaaaaagctgggcgcggtggctcacacctgtaatcccagcactttgggaggctgaggcaggcagatcacctgaggtcaggagttcaagaccagcctggctaacttggcaaaaccctgtctctactaaaaatacaaaaatttgctgggcatggtggtgcatgtctataatcctagttacttgggaggctgaggcacgaaaatcacttgaactcaggaggtggaggttgcagtgagccaagatcatgccattgcactccagcctgggtgacagagggagactctgtctcaaaaaataaataaataaataaataaataaataaataaataattataaataaataaaaggaaagaaagagagacagagagagaaaataaaaaagaaagaggcggggcgcggtggctcacacctgtaatcctagcactttgggaggttgaggcgggtggatcacttgaggccaggagttcaagaccagtctggccaacatggtgaaaccacatctttactaaaaataccaaaaaaattagccgtgtgtggtggcacgcacctgtagtctcagctacttgggagactgaggcaggagactcacttgaacccaggaggtggaggttgcagtgagccgagatcgcgccactgcactccagcttgggggacagaacgagactgtctcaaaaaagaaaaaagagagagaaagaaagaaaaaaaataagcaagcaagctcccccccatcccatctcctagtggatgggacagatctattccatgggtcacctccccctaaccggtcccccaggcccatctgctgtctctgcatttctctgctcctgtccaccatcactgtttgcaccaggctccatctctttcattgtcttgggtctggagatgtaccctgagctcccttagttggtcccccacctctcttatctccttttctcagcatgaccagtgcacttttctttcttttctttttgttttttttttgtttattttttgagacggagtctcgctgtgttgcccaggctggagtgcagtggcgtgatctccactcactgcaagctctgcgtcctgggttcaagtgattctcctgcctcagccttccgagtagctgggatacaggctcctgccaccacgcccggctaatttttgtagttttagtagagacaaggtttcgctatattggccaggctggtctcgaactcctgaccttgtgatccgcccactttggcctcccaaagtgctgggatttcaggggtgagccaccgtgcctggccttttttttttttttttttttttttgagaccgagtctcactctgtcaccaggctggagttcagtggcacaatcttggctcactgcaaactctgactcccggattcaagcgattctcctgcctcagcctcccaagtagctgggactacaaggcgcccaccatcacgcccggctattttttgggttttgccatgttggccaggctggtctcgaactcctgactgcaggtgatccacctgcctcggcctcccaaagtgctgggattacaggcgtgagccactgtgcttggccttttttttttttactttaaaaaaaaccttttttcctcattccatgcttcatttcaaaattaaccattttaaagagaacatttcggtgacatttcgaacatccacattgttgtgcagccgtcgccaccatccatctccagaacgctttcatcttggaaaactgaaacactgtcctcattaaatactcactccccattccccctcccagcagcccctggcacccacccatctactttctgtctctgtggatttgactattctgaacatttcatatcaatggaataatctactgtgtggccttttgtgtctggcttctttcactcagcatgatttttaaaaatttttatttttagaaacagtctcactctgttgcctgggctggggtgcagtggtgtgaaaatagctcactgcagcctcaacctcctgggctcaagcaatcctcctgcctcagcctcctgagtagctgggactataggtgtgtaccacaatgcctggctaataaaacctttttttttttttttttggttggatgcggtggctcacgcctgtaatcccagcactttgggaggccgaggtgggcggatcacgaggtcaggatatcgagaccatgctggctaacacggtgaaaccccgtctctactaaaaatacaaaaaaattagccaggcgtggtggcgggcacctgtagtcccagctacttgggaggctgagccaggaaaatggcatgaaccgggaggcagagcttgcagtgagccgagattgtgccactgcactccagcctgggcaacagagcaagactgtgtctcaaaaaaaaccacagggtcttgctttgttgcccaggctggtgttgaactggcttcaagccatgctcctacctggacttctcaaagtgctgggattacaggcatgagccactgcgcccagcctgccatcatgggttttttttgttgttgttttttttggtgggggggtgggtggtggttaatgcatgttgcagcatggatcagtgctttattattattattatatatttttatgagacagagttttgctctatttcccaggctggagtgcagtgatgctatctcagctcactgcaacctctgcctcccgggttcaagcgatgtttgagcctcagcctcccgagtagctgggtgtggaggcacctatcaccatgcctggctaatttttgtatttttagtagagatggggtttccccatgttggccaggctggtctcgaactcccgacctcaggtgatctacccgcctcggcatccgaaagtgctgggattacaggcgtgagccaccttgcctggcccagaatactttcatcatcccaaactgaaactcaacctctgttaaacatcaaatcaatattctctgcacacccccagccccttctactgttctacttcctgtctctaagccagtgagctttcctttttttttttgggacacagtctcgctctgtcatccaggctggagtgcagtggtgtgatctcggctcaatccagcctctgcttctcgggttcaagagattctcctgcctcagcctcctgagcagctgggattacaggcccctaccaccatgcctggctcatttttgtatttttagtagagatggggtttcaccatgctggccaggctggtctcaaactcctgacctcaggtgatctgcccgcctcggcctcccaaagtgctgggattacagatgtgagccaccacgcctggcctctttttggtttgttgatgtaggctgggctgattgatcctcccccatctgatggtgagcccttgagggctggaacaggatccttcttcctcagcactgtgcactcccagctcccaggcctgtgcttgatcctcagctgatgctcaaaatacagttgaaggaacggcagaaaattccaaatgggtgggcaaaggatgcagtccgctgctggggaggatagatgggctgaggcaggagatgaatgcctcgtggctctgggtgggtgtagggagctcttgggctgcaggtggggttgggtgcatgagccgagatctcagggggctggctgagtaggggctgcagacactgagagagaagaagaagggtctttggaggcagagaagtgggcacagagagatgggctccccaggcagaagtgtagccatgtggccaggagaaggtgggacggagggacgggaggtgtggaggctccatggtcacattcttggccgtcctgcatgtgcgttcaaagcctgggaagggcccggtgcggtggctcatgcctgtaatcccagcactttcagaggccgaggcgggcagatcacctgaggtcaggggttcaagacaagcctggccaacacggtgaaaccctgtatctactaaaagtacaaaaattagctgggcgtggtggcaggtgcctgtaatcccagctactcaggaggctgaggcaggagaatcgcttgaacccagaaggcggaggttgcagtgagctgagatggcaccactgtctgtctgggagacagaacgagacttaaaaaataataataataaaaataaaaagtaacaaagcctgggaaggcctggggaagggggctctcaatcccagcactttgggaggccaaggcaggagggtcgcttgatcccaggaggtcaaggctgcagctgcagtgagctatgatcgtgccactgctttccagcctgggtgacagagcaagaccctgtctgcaaaaaaaaaaaaaaaaaaaaaaaaaagtccagaaaggccggtcttgggctgagtcctgccagggcctggtagccagggcctaacagtgtccttgtgtccttgctaggaggtgaattcctagtgtaggcttgacccactttagctagggaagccacaggatttaccatttccaggggccagctctgcctgaggagagaggccttcctcataaagtcaggcttggcttcctcccagctggctggcctccttctccctgattctaaatgcgggcttgtcaccgtgtgtctgcatgtaggcgcacgagcgcacatctgtgtgtgggggggtgtttgtggtgctgtgggcagcgtgggggtggcatgtgttagcaagctgggggccatttctaccccacggttctttttatatctcacatttacagaaagcctggacctctgagcctgggcctgtcagtgggctgtttgaggctttgaaggaagggaccaagaggcggaggcgtctgaaaccccggcgccgagggaggatagtcgggtcaggggtggctgttagcttccttccattggcactgacggcatgcagcccggggccatagccctgcagtgtcaggtgttgcagagctatattttaagacactggcaccatggttcacacctatattctcaacactgaggttggaggaagctgaggttggaaggctgaggtgggagggtcactggagctcagggattcaagaccagcctaggcaacatagtgagaccccatctttacatatatatatatatatatagcgattatgtgtatatatatatgtatagcgattatatatatatagcgattatatatatacatattttttctcctgcttcagtctcctgagtagctgggattacaggcttgtgccaccacgcccagctaattttgtatttttagtagagatgaggtttcaccatgttggtcaggctagtcttgaactcctgacctcaggtgatctgcccccctcggcctcacaaggtgctgggattacaagcgggaggcactgtgcccagccctacaaatatatatatattttacttagctgggtgcagtggctgatacctgtagtcccagctacttgggaggctggggagggaggattgcttgagcccagaagatcgaagttgcagtgagctatgctcgtgccactgcactagcctgggtgacagagagatcctgactaaaaaataaataaataggccgggcgcggtggctcacgcctgtaatctcagcactttgggaggccgaggcagatggatcacgaggtcaggagatcgagaccatcctggctaacacggtgaaaccccatctctactaaaaatacaaaaaattagccaggtgtggtggcgggcgcctgtagtcccagctactcgggaggctgaggcaggagaatggcatgaacctgggaggcggagcttgcagtgagccgagatcgcaccactgcactccaggctgggcgatggagcgagactccatctcaaaaaataaattaaataaataaataaataaagccgggcatggtggctcacacttgtaatctcagcactttgggaggctgaggtgggcagatcacttgaggtcaggagttcgagaccagcctggccaacatggtgaaacccccgtctctactaaaaatacaaaaattagccgggcatgatgttgggaggtccctgtaatcccagctactcaggaggctaaggcaggagaatcgctggaacctgggaggcagaggttgcagtgagccaagatcccgccactacactctagcctgggcaacagagctagactccatcttaaaacaaatcaaagtaaatataataaataaagcatactctctccacctccactgctgggtcctcaccaggatgaatggttcagagcaaggcctgaaggggtcctccctgagatgctgggagcgtctccctgagaagccctgttgggctggtcccagtggaccctgggtgctcgctgcctaagctgccctcccccatccctgcccagctctgcaccccatgagaagccctgtgggtggcccccaactcaggagttcccacagggagctgagggccggtgatagccccccaggcttatgcagtgacctcgcttaacagctggtaactcctgcaggattctgaggcacccgcctcctcccagagggacacattcatggccttttcctatttatttatttattagagatggggtcttgctctgtctcccaggctggagtccagtggcatgactattgctcaatgcagcctcaaactcctgggctcaagcaatcctcccacttcagcctctagagcagctgggactatgggcatgcaccatgctgggctaatttatttttatgtgtattattgtattaattttttttttttcgacggaggtttgctcttgttgcccaggctggagtgcaatggcacaacctcggcttaccgcaacctccctcttccgggttcaagcaattctcctgcctcagcctccggagtagctgggattacaggcaccccccaccatgcccggctaattgttttttttatttttctagagacagggtttcaccacgttgttggccagactggtcttgaactcccgacctcaggtgatctgcccgcctcaacctctcaaagtgctaggattacaggcgtgagccactgctcccggcctcgtattaattttatttttaaaaataaacacactgcaggcctggcgtggtggctcacgcctgtaatcccagcactttgggaggccgaggtgggcggattatgaggtcaggatatagagaccaccctggctaacatggtgaagccccgtctctactaaaaatacaaaaaattagccgggcgtggtggcgggagcctgtagtcccagctactcaggaggctgaggcaagagaatggcgtgaacccgggaggcggagcctgcagtgtgccaagatcacgccactgcactctagcctgggcaacagagcgagactctatatcaaaaaaataaataaataaaagtaaataaaaataaaataaacacactgtagccttgaaatcctgggctcaagcaattctgactctgcctctcaaaacaatgggactgcagaggtgagccactgtgtccagctaaaaaaatatatatatatgtatatatgtgtatatatatgtatatacatgtgtatatatacatgtgtatgtgtatatatacgtgtatgtgtatatatacgtgcgtgtatatatacacgtgtgtgtatacgcatacatacgtgtgtgtatacgcatacatacgtgtgtgtatacgcatacatacgtgtgtgtatacgcatacatacgtgtgtatacgcatacatacgtgtgtatatgcatacatacgtgtgtatacgtatacgtatatatatatcagccaggttcggtggctcatgcctgtaatcccagcactgcgggaggctgacgtggctggatcacctgaggtcaggagtttgagaccagcctggccaacatagcaaaaccccggtctctactaaaaataaaaaaattagccaggcatggtggcggacgcttgtaatcccagctacttgggaggctgaggcaggagaatcacttgaacccgggagacggaggttgcagtgagccgagatcacgccattgcccgccagcctgggcaacaagagcaaaactccatctcagaaaaaaaaaaaatttttttttctttgagacagtcttgctctgttgcccaggctggagtgcagtgacacaatcttggctctctacaacctctgcttcctgggttcaagtgattctcatgccacagcctccatagtagttgggatcacaggcacgtgccaccatgcctggctgatttttgtatttttagtagagatggggtttcaccatgttggccaggctggtctcgaactcctgaccgccaatgattcgcctgctttgtcctcccaaagtgctggtgtgtccggagttggtgggttcttggtctcactgacttctagtatgaagccgcggacccccgcagtgagtgttacagcccttaagggggcaaatctgaagtttgttccttctgacgtttggatgtgttcggagtttcttccttctggtgggttcgtgatctcgctggctcaggagtgaagctgcagacctttgcagtgagtgtcacagctcttgaggcggcgcatctggagttgtttgttcctcccggtgggctggtggtctccctggcttcaggagtgaagctgcagacctttgcggtgagtgttacagctcataaaagcagtgtggactcaaagagtggtcagtagcaatatttattgcaaagagcaaaataacaaagcttccacagtgtggaaacggactggaacgcgttgccactgccagctgggacagcctgcctttattctctcatctggtcccacccacatcctgccgattggtagcgcccagtggtctgttttgacagggcgctgattggtgcgtttacaatccctgagccagacacaaaggttctccacgtccccaccagattagctagatacagagtgtccattggggcattaacaaagcccgagctagacacagggtgctgattggtgtgtttacaaatcttgagctagatacagagtgctgattggtgtattcacaatccctgagctagacataaaggttctccaaggccccatcagagtagctacatacagagtgtcgattggtggattcacaaaccctgagctagacacagggtgctgattggtgtgtttacaaaccttgagctagatacagagtgccgattggtgtatttacaatccctgagctagacataaaggttctccaaggccccaccagactcaggagcctagctgccttcacccagtgtatcctgcaccggggctgcaggtggagctgcctgccagtcccgcgccgtgtgcctgcactcctcagcccttgggtggtcggatgggactgggcgccgtggagcagggggtggcgctcgtcgaggaggctcgggcggtacaggagcccacggagggggtgggaggctcaggcatggcgggctgcaggtcccgagccctgccccacggaaaggcagctaaggcccggcgagaaattgagcgcagcgccggtgggctggcgctgctgggggacccagtataccctctgcagctgctggcccgggtgctaagcccctcattgcccggggccggtggggcgggccagccggctgctccaagtgcagggcccgccaagcccacgcccacccggaactccagccggcccgcaagcgccgcacgcagccccggttcccgctcgcgcctctccctgcaagctgagggagtgggctccggccttggccagcctagaaaggggctcccacagtgcagcggtgggctgaagggctccccaagtgccgccaaagtggaagcccaggcagaggaggcgctgagagcgagggagggctgtgaggactgccagcacgctgtcacctctcactgggattacaggtgtgagctaccacgcccagccaaaaaaattttttatagatggggtctcactatgttgccgaggctggtctctaactcctgagggaaagcaattctctcgcctcagccttctgagtacgtgtgattacaggtggagtgatgaaaatattctgaaactagatgcaggtggtggttgtattacattgtgaatgtactgaatgcctcagaattgtacattttaaacaattttatgctatgtgaatttcacctcccttcctttcctccctctctccctccctcccttcctccttccttccctccctcccttccttgcttacctccctcccttccttccttcctgtctttctttctctctctctctctctctttctctttctttctctctctctctctctctttctctctttcttctttctttcttgtctcgctctgtcgcccaggctggagagcaatggcgcgagcttggctcactgcaacctctgtctcctgggttcaagcaattcttctgcctcagcctcccaagtagctgggattacaggggcctgccactacacccggctaattttttgtatttgtatttatttttttatttttgagatggagtcttgctctgtcacccaggctggagtgcagtggcacgatctcagctcactgcaacctctgcctcccaggttaaagcaattctcctgtcttagccttctgagtagctggtactacaggcacctgccaccacgcctggctaatttttgaatttttagtagagacgggtttcaccttgttggtcaagctggtctcaaactcttgacctctggtgatccacccgcctgggcctcccaaagtgctgggattacaggcatgagccaccacacccggccaggctttttaaaattttttttgagacagagtcttgctcttctccctcaggctggagtgcaatggcatgatcttggctcactgcaacttccacctcccgggttcaagtgattctcctgcctcagcctcccaagtagctgggattacaggcacctgccaccaagcctggctaatttggtatttttagtagagacggagtttcaccatgttggccaggctggtctcgaacttctgacctcaggtgatctgcctgccttgggctcccaaagtgcctggattataggcatgagccactgggcccagcctctttttactttcttttttttttttgagacagagtttcactcttgttgcccaggctggattgcaatggctcgatctcgactcactgcaacctccgcctcttgggttcaagcaattctcctgcctcagcctcccaagtagctgggattacaggcatgtgccaccatgccaggctaattttttcttttctttctttttttttttttttttttgagacggggtcttgctctgtagcccaggctggagtggagtggagcgatcttggcttactgcaagctctgcttcccgggttcatgtcattctcctgcctcagcctcctgagtagctgggattacaggcgccctccacaactaatttttttgtattttcagtagagacagggtttcgccgtgttagccaggatggtctcgatctcctgaccttgtgatccacccgccttggcctcccaaagtgctgggattacaggcgtaagccaccgcgcccagcctctatttttaatagagacggggtgtcaccatgttctccaggctggtcttgaactcctgacctcagatgatctgcccacctcggcctcccaaaatgctggaattacagtcgtgagccactgcgcctggctctttttactttctttaatgtgactactagaacattttgtttgtttgtttatttatttattgagacagtgtctgactctgttacccaggctagagttcagtggcaccatctcagctcactgcaatctctacctcccacactcaagcgatcctgccacctcagcctcctgagaagctgcgactaaaagcacacaccactacgcctggctaaattttgtattttttgtagagatgaggtttccctcttgtcacccaggctggagtgcaatggcgcaatctcggctcactgcaacctccatctcccgggttcaaacgattctcttgcctcagcctcccaagtagctgggattacaggcatgtgccaccacacctggctaattttgtatttttagtagagacggggtttctccatgttggtcaggctggtctcgaactcccgacctcaggtgatctgcccgcctcggtataccaaagcgctgggattacaggcgtaatccactgtgcccagcagagatggggtttcacttttttgtccaggctggtcttgaactcctgagttcaagcaatctgctcacctcggcctctcaaaatgttgggattacagttgtaacccactgcatcaggctagaaattttaaatgtggcatactttggatttccattgggaggctctggtttaacactactgtgcctccagagacaacacatcacacctatttcctctgcccagcaggtggaaacccccagggccactgtggacccacagcaaggcagagagaagtcttagaagagccgaggtggggaggagagctgtagctgtccacccactaactggaattttctttcttttttttttttttttttttttgagacaagggctcgctttgtgggccagctggaatgcagtggtgcaatctcggctcactgcaatctctgcctcctgggttcaagcgattctcctacctcagcctccctagtagcttggattacaggcacctgccaccacgctcagctaattttttttttttttttctgagatggagttttgctcttgttgcccaggctggagcgtaatggcgtgatctcggctcactgcaacctctgcctcccaggttcaagcaattctcctgcctcagcctcccgagtagctgggattacaggcatgcactaccatggccgactaattttgtatttttagtagagacagggtttctccatgttgaggctggtctcgaactcctgacctcaggtggtccgcccgcctcggcctcccaaagtgctgggattacaggcgtgagccactgcgcctggccaacgcttagctaatttttgtatttttagtagagacggggtttcaccatgttggccaggctggtcatgaactcctgtcctcaagagatccgcccgcctcggcctcacaaaatactgagattgcaggtgtgagtcaccgtgcctggcctggacttttctttttaattgttaattattttttcttttaaatttttttttttgggatggagtttcacttttgttgtgcaggctggagtgcagtggtatgatcttggctcactgcaacctctacctcctgggttcaagcaattctcctgcctcagcttcccgagtagctgggactacaggctcctgccaccacactcagctaatttttgtatatttagtagaggcggggtttcaccatgttggccaggctgatctcaaactcccgacctcaaattatccacccacctcggcctcccaaagtgttgggattacaggcgggacccaccgtgcctggcctaattttttttttttttttttgccagtcttaactctgtcacacaggctggaatgcagtggtgtggtcatagctcactgcagtctccacctcccaggctcaagtgatcctcccgcctcagcctccgaagtagccgggactacaggcatgaggcaccatgcctagctaatttttgtaacgatggggtcttgccatgttgcccagggtggtcttgaacttctggcctcaggcgatctgcccccctcagcctccgaaagtgctaggattacaagcacgggccactgcacccagccactgacgggactttggattcatggtttggttccagaggtagcaggacctaactctccctggctggctggggcgggtaggggaaagagatggtttcaatatcttgaaccaccctgaactttggacctcctgaagttcaaggacctggagattgttgttctggatcacgatttaggagggggcggaggcgggggtggggtggacgtggcagaagttaactaggtctcaaccagcaggggcgtgtcctcacctcagggaaatggcaagtgtgactggatggaaaccagaaaccaaccggttatagattcaagtctcatcctttttacaattgtatgacattggacaagtaattgagcctttttgagcctttctgactctttattttcttttgagacggagtcttgctctgtcgcccagattggagtgccagggtgggatcagggctcactgcaacctccacctcctgggttcaagcaattctcctgtctcagcctcctgagtaagctgggattacaggtgctcaccaccatgtccagccaatttttgtatttttaatagagatggggtttcactatgttggccaggctgatcttgaactcctgaccgcaagtgacccacctgcctcggcctcccaaagtgctgggattacaggcatgagccactgtgcccggcctgactcttacacttttctgatcagaaactttctcccttggatcctttgaggccaggagtttgagaccaggttgggcaacatagcaaaaccctgtctctttttttttttttgagacggagtttcactcttgttgcccaggctggagtgcaatggtgtgatctcggctcaccgcaacctccgcctcccgggttcaagcaatcctcctgtctcagcctcccgagtagctgggattacaggcatgcaccaccacgcctggctaattttgtattttttagtagagatggggtttctccatgttggtcaggctggtctcaaactcccgaccacaggtgatccatctgccttggcctcccaaagtgctgggattacagctgtgagccaccacgcccggcttttttttttttttttgagccagagttttgctattgtcacacaggctggagtacaatggcgtgatcttggatcactgtaacctctgcctccctggttcaagcaattctcctgcctcagtcccgctgagtaactgggattacacatgcccaccaccacccccggctaatttttgtgtttttagtagagatgttgggcggggtgggggggggggggtctcaccacattggccaggctggtctcgaactcctgacctcagattatccacgcgccttggcctcccaaagtgttgggattacaggcatgagccgccgtgcctggccaaaaccctgtctcttaaacaaacaaaaaaggttaggtgcggtggctcacgcctgtaatcccagcacttttggaggccaaggcgggcggatcacttgaggtcaggagtttgagaccagcctggccaatgtgatgagaccccatctctactaaaaacacaaaaattagtgaggcatggtggcgggcacctgtagtcccagctactcgggaggctgacacaagagaattgcttcaacccgggaggcggaggttgcagtgaggtgagatcatgccactgtactccagcttgggcgacagagcaagactgtatctcaaaaaataaataaataaaaagtaaaaaataaaaattagttgggtgcagcggcacccacctgtagtcctagctactaagtaggctcaggtgggagaattgcttgaaatctggactttaaggccagcctgggcaacatagtgagatccatctctattttatttatttatttatttgagagagggtctggctctgtcacccaggctggagcgcagtggtgtgttcatagctcactgcagcctcgacctcctgggctcaagagatcctcccatcccaacctcccaagtagctgggaccacaggagtgtggcaggctgggcatggtggctcacacctataatcccagcactttgggaggccaaggcaggtggatcatttgaggccaggagtttaagaccagcctgaccaacatggagaaagcccgtctctattaaaaatacaaaattagccaggcgtggtggcacatgcctgtaatctcagctacccagaaggctgaggcaggagaatcgcttgaacccaggaggcggaggttgcagtgagccgagatcacaccattgcacagagcgaaacctcgtctcaaaaaaagaaaaaaagaagtgaggtctcactatgttgcccagccttgtctcaaactcctggactcaagtgatcctcccgtcttggcctcccaaagtgctgggatttaaaaaaaaaaagtagccaggtgtggtggcactcacctgtggtcgcagctacttgggaggctgaggtgggaggttcaattggaggaggtcgagggtgcagtgagctataatgggaccacggtactccagcctgggaaacaaagtgagacactgtctcaacaacaacgacagaaaaccaaaccaaaacaaaaaagaagaaaaagaaaaaagagactgcctctgtctttccagttttggtttccttccttccttccttccttcctttttctctttcttctttttttttttttgagacagtgtctcgctctgttgcccaggctggagtgcagtggtgcgatcttggctcactgcaatctctgcctcccgggttcagaacagcaattttcctgcttcagccttccgagtagctaggactacagacatgcgccaccatgcctggctaatttttgtatttttagtagagatggggtttcaccatgttggccaggctggtctcaagcccctgacctcaaatgatccatctgccttggcctcccaaaatgctgggattacaggcgtgagccactgtgcctggcctgccactttctctacctctcctaagcagccactcccctcacacaagagaattgcttcaacccgggaggcggaggttgcagtgaggtgagattgtgccgctgtactccagcctgggcgacagagcaagactgtatctcaaaaaaataataataataataataaataaaaattaaaaattagttgggcgctgtgaaacccacctatagtggcccactgcgcctggccatccagttagaattaagagtggtctctccgggcgtggtggctcacgcctgtaatcccagcactttgggaggctgaggtgggaggatcacctgcggtcgggagtttgagaccagcctaaccaacatggtgaaaccccatctctacaaaatatacaaaattaggcgggcatggtggcgcatgcctgtaatcccagctacttgggaggctgaggcaggagaatcgcttgaatctgggaggcggaggttgcggtgagccgaaatcgcaccactgcactcctgcctgggcaacaagagcaaaactccatctcaaaaaaaaaaaaaaaaaaaaaaagtggtctaatctttggctgttttccatctggcctccaggtggcgctgtcgactgactccttggcttgttcaggctgtgcaacctcaggtaaaccaaggcccccgggagcctggagcttgggacactaccttgagcaaggccctggacctaattttgtggagttccaaatctaatttgattgtccaattgatttacttttttttgtttgtttgttttgagacagggtctcactctgtcgcataggctggagtgcagtggtggtgcgatctctgctcactgcaacttctgccttcctggttcaaggaattcttatgcctcagcgtcctgagtagctggggttacaggcatgcaccaccacgtctggctaacttttgtatttttcgtagagacagggtttcaccatgttggccaggctggtcccgaactcctgacctcaagtgatccacctgcctcgggctcccaaagtgctgggattataggtgtgaatcacggctcccggatttttttcaaaaatttcaaaatttattatttgtttgagacacagtctcactctgttgcccaggctggagtgcaatggggtggtctcggctcactgcaacctccgacccatggggtgaaggggttctcaagcctctcaggctcctgagtagctgggattacaggtgtgagccactgcacccggccgaagttctagattctttttgtttgtttgttttgagacgaagtcttgctctgtcgagatctcggttcatttcaacctccacctcccaggttcaagcaatcctgctgcctcagcctcctgagtagctctgactacaggcacgcaccaccacgcccagtttgtatttttagtagagacagggtttcaccatgttggccaggatggtctcgatctctttctttttgttttttgagacggtatctcgctctgtggctcactgcaacctctgcccaggttgaagcaattctcccagtagctcaattactacaatggtggggattacaggaacccaccattatgcccggctaatttttgtatttttatagagactgcgtttcaccattttggccaggctggtagtgaactcctgacacctcaagtgatctgcccgcctcggcctcccaaagcggtgggattacaggtgtgagccaccgctcccagcctcgagttctagatttgttaatcagttacagttttctcacctttggctgtttgccagctggcctccaggtgacgctgtcgacctgcctcctcctccacttgtacagactgccacctcaggtcaaccaagggcctccaggccgtccctggagcctggagctcgggacaccccattgaacaaggcccgggacttaatcttgtgcagttttgaatctaatttgattgtccaattgattgattattatactgtggtctttgattggacaaggcggtccttgagactcaggaaacacattttggagaagaaggtgcctgggcacccttagaacatttttccaagctgggcattgtggcatgtgcctgtagtcccggctacttgggagtctgaggcaggaggatcccttgagtctacaagtttcaggccagcctgggtaatataacaataccctgacttaaaaaaaaaaaagtgcttgatgtaatcccatttgttgatttttccttttgttgcctgtgcttttggggccttgcacaaaaaatctttgcccagaccaacatctgagcattttcccaatgttttcttattttccttctttctttcttttttctttttttttttgaaacagagtcttgctttgttgccaggctggagtgcagtggcgcgatatcggctcactgcagcctctgcctctcgggttcaagcaattccactgtctcagcctccagagtagctgggactacaggcgtgcgccaccacgccaggctaatttttttgtattttagtagagatggggttttaccatgttggccaggatggtctcgaactcctgacctcgtgatccgcccgccttggcctcccaaagtgctgggattacaggtgtgagccacctcgcccaggcttcttttttgtttgtttgtttcttttgtttttttttgaggcagagtctcactctgtcatgcaggctggagtgcaatggcacaatctcagcacactgcagcctctgcctccccggctcaagtgattctcctgcctcagcctcctcagtagctggaattacaggcacccactactgtgcctggctaatttttgtgttcttagtagaaatgtggttttgccatgttggctaggctggtttttttttttttttttgagacagagtcttgctctgtcacccaggctggagtgcagtggcgcgatctcggctcactgcaagctctgcctcccggattcacgccattctcctgcctcagcctcccgagtagctgggactacaggcgcccgcaccatgcctggctaattttttttttttttgtatttttagtagagatggggtttcaccgtgttagccaggatggtcttgatctcctgacctcgtgatcagcccgcctcggcctcctttcaaagtgctgggattacaggcttgagccaccacacccagcccaggttggtattgaacttctgacctcaggtgatcctcccacctcggcctcccaaagtgctgggttacaggtttgagccactgcgcccggcctctttggttttttgtttttttgtttgtatttttgcgacagggtctctctctgtcatccaggctggagtgcagtggtgcaatctgggctcactgcaacctctgcctaacaggctcaagtgattcttgtgcctcagcctcccgagtaactaggactacaggcacgagccaccacacccagctaatttttgtatttttgtagatgtggggtttcaccatgttgcctaggctagtctcaaactgctggactcaaatagtccgcctgcctcaaccttccaaagtgctgggattacaggcatgagccgtcgcgcccggcctccaaagtttccttctaggagtttcatagtttcaaatcttagatttaggtttgtaatccattttgatttgatttttgtgtgtggtgagagataggggcctagtttcattcttctgcacatagccagccagttttccgagcaccattttattgaagaaactgtcctttccccagtatatattctttttttttttttttgagagacagtcttactctattgcccaggctggagttcagtggcacggtctcggtgcaacctctggctcccgggttcaagtgattctcctgcctcagcctcctgagtagctgggattacaggcgcccaccaccacatccggctagtttttgtatttttagtagagactgggttttaccatcttggccaggctggtcttgaactcttgacctcaggtgatgcacccacctcagcctcccaaagtgctgggattactgacgtgagccatggcaccccacctaaatatttatatttaagatgacacatatcccaagtacacttgatttgatctttacaaattatatgaatgtattaaattatcacatgtacccccaaaactatgtacatctatgatgcatcaataaaaaaaagtattgagtgtagtggctcatgcttgtaattccaactactcaagaggctgaggtggaggatcgtttgaggccaggagttgcagaccatcctgggcaacatagcaagatgcagtttgcacaaaaaattgctggatgtggtagtgtgcacctgtagtcccagatacttgggagactgaggagggaggattggttgagcccaggagctccaggctgcagtgagccatgatcgcgccattgcactgcagctttgatgacagagcaagaccctgttcatatatatatatatatatatatatatatatatatatatatacacacataaatgtccaaatatatatatatcagagtgggcaggagggaggtcgccttttgcagggctgcagggacaggtatgagagaaccaagagtgggtgagaggggctgggcctgatgtaaacgtgtgcagggctcgtaggggcctggggctgggggaagctcacagggggagaggtagtaggcgtgacgggtgtgacaggagaccgcagcgtgggaccggccatcattccaggcagggcaggggcggcagagacaggagcccagatggaacgtaggcaccctatatagcggacgtggctgtcatcaccgattcaggacgtgggtgggatgacattggtttccgtgtctgtcccctctgcagtctctcctccgcgatggctgcccctgtctgctcatcctcacctggccttcagcaggtgctcagctgacatcggtgagggaatgggagtgattcgtcatcacagtaaccgtgtacttcaggtaaacgctcagaaggaagccagttcccacaggactcacagtgggagacagagcggagcgtccagtgcttcctcggctagctgtatcccacgatgccgggtcatttgcggacacagtctgcacctcctttatcgcttgtgttactgatgtgggttgaatagcatctgctttagtctgtttggactgctataacaaaatatcgtagactgggggattcatgaacgacagaaacgtgtagctcacatttctggaggcagggaagtccaaggataggatttttttttttttttttgagacggagttttgctcttgttgcccaggctagtgtgcagtggcgcaatgttggctcactgcaacctccaccttccagtctcaagtgattctcctgcctcagcctcccaagtcactgggattacaggcgcccaccaccatgctcaggtatttttttttgtatttttagtagagacggggtttcaccatgttggtcaggctggtctcgaactgctgaccttgtgatccacctgcctcggcctcctagagtgctgggattacaggcttgagccaccacgcccagccctgactttttttttttttgagacagaggttcgctcttgttgcccaggctggagggcgatgatgcgatcttggctcactgcagcctccgtctcccaggttcaagcgattctcttgtctcagcctcctgagtagctgggactacaggtgtctgccacaatgcctggttatttatttatttatttttgtatttttagtagagaaggggtttctccatgttggccatgctggtcttgaactcctgatctcaggtgatccgcctgcctcggcctcccagagtgctgggattatgtgtgtaaaccactgtgcccagccaaatgtctgctattgtaagccacccagcctgtgataatttattacagcagccacaggaagagactaatacaactcctatttctttaattttttattttattttatttttttgagacggagtttccctctgtctcccaggctggagtgcagtggcatgatctcggctcactacgacctccgcttcccaggttcaagccaattctcctgcctcagcctcctgagtagctgggattacaggtgcccgctaccacacctggctgatttttgtatttttagtagagatggggtttcatcatgttgtccaggctggtcttgaactcctgacctcaggtgatgcacccacctcggcctcccgaagtgctgggattacaggcatgagccaccatgcctggcccaactcctatttctttaatttttttttgagatgggttcttgctaggttgcccagtctgctctcaaactcctgggctcaagtgatcctctcgccttagccttagctgggactacaggtgcttgctaccacacctgacttctttaattttttttttttttttttttttttgagatgatgccttgctctatctcccagactggaggctctgtcacccaggctggagtgcagtggtgcaatcttgtctcactgcaacctctgcctcccgtgttcaagcgattctcctgcctcagtctcctgagtaggtgggattacaggcacccgctgccacacctggctaatttctgtattttttagtagagacggggtttcaccatgttggctaggctggtctcgaactcctgaccttgtgatctacctgcctcggcctcccaaagtgctgggattacaggcatcagccactgcgcctggccactttttttttttttttaacttgaaacattttatctttttttttttttttgagatagggtttcgctctgtcacccaggctggagtacagtggtgtgatgacagctcactgaagcttcaacctcctgggctcaggtgatcctcccacctcagcctcccaaaatattggattataggcatgagccactgcacctggcctgttttatcacttcttttaaattttttttttgagaaagagccttgctccgtcacccaggctggagtacagtggtgcgatctcggctcactgcaacctccgcctcccgggttcaagcgattgtcctgcctcagcctcccgagtagctgggattacaggcatgcaccaccacacccagctaactttgtatttttagtagagatggggtttctccacgttggtcaggctggtctggaactcccgacctcaggtgatctgctcgcctcggccttccaaagtgctgggattataggcgtgagcctctgtgcctggcccagttttttaaatttatttatttttttgagacagagcctctctccatcgcccaggctggagtgcagtggtgtgatcttggctcactgcaacctccagggttcaagtgattctcctgccttggcctcctgagtagctgggactacaggtgcacgccacctcccctgtctaatttttgtacagtagagacggggttttgccatgttggccaggctgttctcaaactcctgacctccatgatctgcctgcctcaggcttccaaagtgctgggattacaggcgtgagccaccgtgcccggccctgttttatcactttaatcattggtatctgtaagagactggctttgctgggctggtggggctttctccaatgcacagtgaaataaatgcagcttcctggctgggtgtcctgaccccatcctctctgcttccgggtatttccctaaagttgagccttcaccccagcgttgccctgagttcctgaggctggggttccagtcctggaagctggggtgctctggctgggccccctgcacagtctgggctctctcacaagtcctccagcagagcgatgtcacccttccacgtccccaccccagttctctgacggcagctgaaggggatcaggatatgttactcttaaaaatatatcacttagagaccgggcacagtgactcacgcctgtaatccagcactctgggaggtggaggtgagtggatcatttgagctcgggagttcgagaccagcctgggcaacatggcaaaactccatctctaccaaaaatacaaaaaattcaccaggcatatggtggcatccacctgtggtcccagctacttgggaggctgaggtgggaggatggctcgaggctgcgaggctgaggttgcagtgagccgagattgcaccactgccctccagcctgggtgacagagcaagaccctgtctcaaacaaacaaacaaacaatctattatctatctatctatctatctatctatctatctatctatctatgtatctatctatgtatctatctatcaactttagcataagaattattctgagctgaatgcaatagaaaatcagtagatggccaggcgcggtggctgacgcctataatcccagcactttgggaggccgaggtgggtggatcacctgaggtcaggagttggagaccatcctggccaatatggtgaaaccttgtctctactgaaaatataaaaaattagctgggcatggtggtgggaacctatagtcccagctactcgggaggctgaggcacaagaatcccttgaacctgggaggtggaggttgcagtgagtcgagatcctgacactacaatccagcctgggcaacagagcgagactctgtctcaaaaaaaaaaaaaaaaaaaaaaaatcagtagaggcagaaagaattctctgctctctacttttctgcctcaaagccaggcataaacttctctttaagaaggtgacataaggctgggcgtggtggctcactcctgtaatcccagcactttgggaggccgaggcgggcagatcacaaggtcaggagatcaagaccatcctggctaacacggtgaaaccctgtctctactaaaaatacaaaaaaattagctgggcatggtggcgggcacctatagttccagctactcaggaggctgaggcaggagaatggcgtgatcccaggaggcagagcttgcagtgagccaagattgcaccactgcactccagcctgggcaacagagtgcgactccgtttcaaaaaaaaaggtgacataaattttcctttgtggaggtatccccccgtctccttaccagggagagcagaatgactcctatcactgcagatagtcagtcccaagatgagtctacataaacaaaccttcctaaaataactctctgtctccctctctctcttttttttttggaacagggttttgctctgtcacccaggctggagtgcagtggtgtgatcataggtcactgatgccttgacctcctgggttcaagtgatcctcctacctcagcctcccaagtagctgagaccacaggcatgcaccgccatgccgggctaacttttgtattatttatttatttattttttgagacggagtttcgcttttgttgcccaggctggagcgcaatggcatgatctcggctcactgcaacctccacctcccaggttcaagtgattctcctgcctcagcctcccgagtagctgggattataggcatgcgccactacgcccggctaattttgcatttttagtagagatggggtttttccatgttggccaggctgttctcgaactcccgacctcaggtgatccgcccacctcggcctcccaaagtgctgggattacaggcgtgagccaccacgcctggccaatttttgtattttttgtaggaatggggtttcaccatgttgcccaggctggtctcgaactcctgggctcaagtgatcctcctgcctcagcctctcgagtagctgggaccacaggcatgtaccactacactctgcttttttttatttttagtagagacaaggtcttgccatgttgcccaggctggtctcgaactcctgagctcaagcagtccacccaccttggcctcccaaagtgctggggttacaggcgtgagacaccgcgcccggccaatgcctgggcttttgcacctcagggcatttctttttcttttttttcttgagtctcgctctgttgcccaggctggagtgcagtggcatgatctcggctcactgcaggctctgcctcccgggttcacgccattctcctgcctcagcctcctgagtagctgggactacaggcgcctgccactatgcccggctgattttttgtatttttagcagagacggggtttcaccgtgttagccaggatggtcttgatctcctgacctcatgatctgcccgcctcggcctcccaaagtgctgggattacaggcttgagccaccgcgcccggtcacctcagggcatttctatgacaatcatgcccttccaaccttccaggtgatgaggctcaagcaatggcctgagagtatgtgagactggggactaggccaagctccgcccctcttcctcatcccctgatcttcccaccctgtgtctcctgggcaactaacactctagcctgatgatgtgcactgtggaggccttgggtctacctcttggcactcgggcatagacttggcctttgagttcagggctcatggggggcttcggtagtgaacttcattcctgggaggacagatggctgcagcctcattgacagcagagggaattgcacaaaccctggcttactccagtggctcctggacacactcaaccccagcaccatgggagggggaccagaggccagctctgcaatggatgggcagcttgtttagaagcctgtggtggttgccagattgcctggttagaaagttaaacccctccctccctcccttccattccatttttttttttttttttttttgagacgtagtctcactctgtcgcccaggctgcagtgcagtgacgcaatctcagctcactgcaacctctgcctcccaggttcaagcgattttcctgcctcagcctgccaagtatctgggaatataggcatgcaccaccacacctggctaatttttttatttttagtagagacagggtttcactatgttggccaggctggtctcaaactcctgacttggtgatctgctcaccttggcctcccaaagtgctgggattacaggcgtgagcctctgtacccagccttaaaaaaaacaaacttttttttttagagacagcgtcttgctatgttgcccaggctggtcttgaactactggcctcaagtgattctcccaaagtgttgagattacaagagtcagacaccgcactcgacctcaaaactttgacttctcgttggactgatcttttcctagatgccattattttatttatttatttttacttttaatttttttagagatgggatctttctacgtcacccaggctggaatgcaatggttattcacaggtgtgatcatagctggtcttgacctcgtgggctcaagtgatcctcctgcctcagcctcctgaacagctgggactacaggtgtgtgccaccacatttggcttaccattattttagaaggacttacacctgtcttgctatctggagtctgcagatttcttacccaaggtaagctcaagcagggcctgttgtctggaacaagacctgttcaaaatgtttgccttaatgctacagtagtaatggtgatagtcaatagtagcttgctatgggtcaggtactgttgtgagaacagaagctctcaaaggggtattggactctggggatggctgaaacacttcgtgggggcgggggttggtgtccacgagaccaaattattattattaattatctaagatggagtcttgctctgtcacccaggttggagtgcagtggcacgatcttggttcactgcaacctccgcctcctgggttcaagcaattctcctgcctcagcttcccgagtagctgggattacaggcacccaccaccacgcgtggctaatttttgtatttgtagtaaagacggcgtttcactatgttggccaggctggttgtgaactcctgacctcatgtgatccacccacctcggcctcccaaagtgctgggattataggcgtgagccaccgcgccctgccttttttttttttattttgagacaagagtctcattccgtcactcaggctggagtgcagtggtgggatcttggctcactgctaacctccgcctctcaggctcaggtgattctcatgcctcagcctccggagtagctgggattacagtttgtgcaaccacgcatggctaattttttttgtatttttagtagagatgaggttttgccatgttggtcgggctggtctcgaactcctgacctcaagtgatccatctgccttagcctcccaaagtgctgggattacaggcgtgcatgatgcccggcctccttgtcgctttcaaacagtgcttctaggagctaacaaagaagtgcctctttgtatgattccccaagagagacccacccaggcagcacctagccaagggacaaagaccactcctatccaaaagccctttgattcaacttttttttattttttttttctttttgaatgtcatgcaataattcacagtcccaagcccacggttttcaaacaaggtaggaaaaaaggaaaaaagaagcaaaggaatcggtggtgatggtgggtttttcttcttcttttgttgtttcaagcaggaccaaatgtcagaaaaaaatgcctcttttctcaatcattaatttttttgtcctttttaaaattgtttattgttattattatttttttaaattgatttctgcaggcagtaatagtagggtttggtataaccggcaagcactcttgtgtgtgtctgagaacgtgtgtgggtgtgagtgtgtctggtggtgggtgtagggcactgggattctggttccttctggcttctttgccgcactcggccaccagctgtcttcatcagggaaaggaaagattcaattgagatgataaaactcatcaatagaagctatttttttctccccgttttttcttttaaaaatgtttttttttttttttttttttttttttttcatgttccccaaagttctccaaaaatggctgagttaattcaaatcccttggctgtgtggtttgtctgctccctgcctcccacccgagagcccctgtcgtgggtggggggatcggggctggttggggggcgccgtggctgcccaggagggtctcttttggccgagggtctctgcgggacacccttgtggcccagccctggcctctccagagtctggggtctcccggctggccctctcccgggccctctgtgctgggcccccgcggcctctgcgcggctcctcgggtggggtgtgtgcgtggggtgcgtggggggccgggcgggcgccacctcgcccgggcttagcaccaatcatcgtcactctcgctgtagggttcgtgcaggcccttcctggagcccggcccgcggggcctggccagtccgtgcgccgggtagtagccgttggggagtcgccggccgtgccgagaaggcgaggcgcaggccgggcccgaggcccggggagtcctgggcgagcgcccggtggcgcccgaggacgcgtgtcgtacggggggtggcgcgtcgtaggccccggccatggcctcctcgccgcccccgctgcccgggccatcggcctcgtcgtagtcggagccccggtagtagccatggtgccggggacccgggggcccctcggacacgtgcgggccagatgccggccaccgggccccgccgtgtcgacaggccctgggggactcgctccgggccgggcctgggacccgcctctccatcctgggcgagcggccgctgctgtggccccccgtgggcggccgatctccggccagaggctcggccgtggggcctgggtacctccgagggccgctggtggccgcccggcccggcctggccaccgcctgctgctgctgctgctgctgctgctgctgctgctgctgcgggggccccgagccgccggccttacggatcacaggggaataggacacgtgtggccggggggtggagggggtctgggggagctggcggcggccccgccgcggagtgctggtaccagatgttgagggggctgggcttccacttacggaactactgccctacacgaaaattgaaacaaaggaaatcaaaaaaaaagatacaacaaaatcaaaggagacacgggattgggaggaagagaggggagcgaagggagaggggccgggaggagagggaggagggggagggggaggaggaggaggaggaggagaggggggacacaggacattgaatggaaaaaagcaacagccacagggaggagggaggggaggagggggagtgagacagggaggggaggagtcgaaaaccaacacaacaaagtgaaaagagaaatgagaaatggagttttgtaagtttcggggttaaaaatagcagaagtttcaaaaattactcacaggcgtccagaggacagaaatcataattgaaacaaaaacagaagccgggttaaaggaaagtgaaaggtcgggcggcacggcccagaactcaaatatgatccacaaccgaggagcaagcagctgcgggcggcggggagggggcggcgggtgggcaagggggctggggggacagcataggcagctggtgtggtggggatccgtgtccgctccggccgccgggcaccccggtggcttgggggcaggatgggaggtggtcacagccgggatccggggacctttgcctagagtggctgttggatggggtatccccttctctcctccccgcctcccggccgagcccagcctggggtcacttgcagccgcacccacctgccggtgcgccatgtgctctcggccctcgctgggcgagcgggaccagcgctggtcccgagcccgtgcccggccgtggtccggccgttcctgggcatagcggtccttgtcggggggcgggggatggtggtggtggtggtggtggtggtggtgctgtcgatgcttccgatccttgggccggccccgctcctggtcccgctccttcgacggcaggtccccggattgggtggtcatgctcaggtctgtccccaagcctgggccgggtgagggtcagacagacacacaggtggtcgtgagggagaggtggggcagatgcacacacaggaggccacctggaaggtgtgggggccctagagatcccctgaaccgaggcaggtcagtgggttggggggagggggtagtacccaggttcctgcagctgctgcctggccccctctgtcccctctccatggaggcctctccctttcttcttccttagtgtctcctccgccctgccttctcctcccctctcctctcctctgttctgcttgtccctgagcaccacagggctgcccacctgtgtccacatcggtgtagcggcccagggagcgctcagaggcgcggtggctgcggtcgcggcgccgctggtggtgccgctggttctcctcgggcgggacccgctccagcgagtaatcgtccaggcgtcgggccttggggcccagcacggaggctgaacgcttcatggggctggtgtctgagatggtctgggggaggggacaggccggtgggctggggtcagcagctagcaccaagtggtcccggtccttcctgccccattgtggcagcctggtggtggccttcggtgactgcggtgtgaccatcctggggcaggggccaggggatgccatggggccttggctccccctgatcaatcagggctctgggtgtggccaggcctctgagggtggagcctgaggattcctctgtccctcagagacaggactgctccttttgagcccatcctgggttctgaccagaaagatctgatcctcactctccagtcctgggggcccagccacagttgggcaggctcaggctggccagagggaagccctctccacatccagggtgcaaacctgggagccctggactgccgcactcatccctgccccagcttgctctcctgggagggtgagaagcctccgactgtggctggctgacctatgggctcaggaccaggtgcccggcatggcagctttgggtcctcccggctaacggggctgtgctcgctgcccccacaagtctgagtccttctggtgaggcccaagctagggagctctgggtgggggtgggggatacccaggcactggaggctctgggggcccactcttttccctggtgcttcatccctgggtcaagccctgacacacaggtttctctgcagcaggcagaggagggaaggagggagatggggcagacgcccgcctcccagggtccagcccagctgagcgctggtggccctgctccaggtaggagctgcaggaccaggggttggtggtggtgtcaggagaagaagccccccagaaagaggtgcagagtgggccaggctcttggagagccagtgtcctccggcgtggggggccctgaagaaaagggggtaggggtgaggatggggatggccccgcccaccagggcttatgggtgaggggcacacacaggacaccacacacaaggattgggctccatggaggggagagggtgcgattgccaaagaaagggtggggtccggggacggtgagagatgacgggactccctggagggggggtggggaggaagagggggccggagccctgctgggcgctgggcaggcgcggtacatacactgaggttattcccacgtggccggccccttctcctctgtcacagccccatgggatggtgcacacagaaaaaacagaaagaagaaaataaatataaaaggcaagagggagagtgaggaggtggtgcatggagaagaagccaaggaggggagtggcactggcatcaagagaaatcggagggagaaggcagggaggaaaagaaaagttaaagtcctggcgggtgggtgtcccaggcccccggggctgggcgtcctctattcccatgggtacagaggagacagacaggagatgcagacagacaaatggcagaggcatgggaccgaaagacaggacggcgcagcctcgagcccctggccctgggctctgcctcatgcgatgcacaccccaacccctggctccggccgatgctcaaagcttccatgtggtggccgtcagctgggcttgtcccaaccctctcctggggcccagcagctcggtcctgagggagcagcagcatgcacgctgggtgctccccaacccacgttcccagcagccagaggccaggccctcaggtgaccctggtccagccaggcacagcacagcctcctgccccgtgcagacgccacacacggcacacggaaagctcgccacagccacacatgccacgcacccgggccaggctctcacagccatgccctgttctcctccagaggcgggctgcgtgcatgggcccccgctgttcaggccgggtgggcagccagctatgcctctgggccctctgtcccatgagtccaaggcaacgggatcacctgcaggtgggcctggcagctgggtgaagcggccacacacagacacacatcaagcacacacccctgtgccccccaatgactcccacagagaccagacagaaaatacgagcccagctgcccccagacccaccccagactctgctactgtatcctaggacctgccaagttcccatatgcagacacgtgtgcacgtacatgtgtgcatgtgtgagtacatgtgcagtgtgtatatgcccacgtgcacacacgtgtgtgtatgcaagcatctgagtaggcgcacagctgcacatgtgtgtgcatgtatgttgagcatgtgtgtgtgtgtttgtgtaggggtgatcttcgtggcaggtctcagctggccctgttgaaccctgctgcacccacaaatcttccacaacctcccctgtctgcagcctccaaccagggcagccagagaccattttgcagtggccactgccctctgccccagggggagcactttcctctctgtcctctgtgagggaggagggtctgcaggtgctccaggtgtgaccaggtggtgggtggggcctgcagactgcttcagagactgaaggagtccctacccaggcctgagtccggcagggaggggatgcactgggctgcttgtgggggggcctggccctacccagtgcagagtgaggggtccagccccagggcagtggtgaaagccctcacctggttctctgcagggaggcggggcatggaggcagcccggccctggccttccatggggaggtagtgctcgctgtcggagtagccatctctgcccatctctcgcatctccacggactgcggagcagatggcaaagccagatgagctctggggcctgacctccagatccctggtgtctgcagagggagggagctgcaggtgtgtgtgtgtggggggcccagatcccttccacctgaaccacccgggccctgggagccattggggagttgggggacagaggcacctgagagttaggctggctgttgggcatgtcggtaggggggccttgttccggactccatgtgcccgtcttctggaacatctcctgggcacgctgggtcacccaggacgggctctccttgaggccgctttcgtgagccatcctgcatgggggacagaggccggggtagcagtgggcgcttgggcagcttccagaacgtggggaccacggcacccccacactccacctccctggcaggggtgacactcacagggctcctcctgggtccagctgggtggaggggagggcgttctggccaggtcccccttcctgcgttggggacgggggctccatgcgctggaacatgaggggtgtccggtcctggggaatggggcagagagcagtgtgtggacaagggtggggtggtgggacggtggtacccagaaggcattgcgacatccccagtatacacacacacacacacacacactctctcaggtctcatccatctagacccttccaattccacgcagaactggaccacttctcactcctccacccaagtcatagccccagcctggtcccacgtcctcatctctcactgcaggcaccttctcccaggtctcccgctcctaccttcaaccccactgttccacaagagccaccagagggcgcccatgagcacttgagtcaggtcctatccctcctttgcttagaaccctccatggctcccacttgcttggggaaaaagccagagtccttcctgcagctcccatggccctgaaggatctgccctgtcacctccttgcccttgtctcctccctgctcttttccaccacactggcctctttgctgttacccaaacaacccaggcacggtccagcctcagagcctttgcactggctgtttcctctgcctggaacacccttccaggtattgcttagctcactccctctccccttttccttcaagcctttgctcacatgtcactttctcagggaggctccccaactacccatttcccaccgcatcccctcctcccctggatactcctatcttctggattcttctccactttcccccacgacactttctttctctttgctggatgttgcacgattcagtcatttgctaccattggcatttccccacttggaatgtctgctccctgagggcagggattctggcctattttccccatgggtgcatccccgaggactgagaacagcgccctgcacacagtaatactcaataagtgttggtggagcagctgaatgaagaatgaatccacatgatgtgtccttggcaagaacttttttttttttttttttttttttttttgagatagagtcctgctcttatcacccgggctggagtgcagtggcttgatcttggcttgctgcaacctccacctcccaggttcaagtgattctcctgcctcagcctcccaagtagctgggaccacaggtgcatggcgccacatgcagctaattttattttttttttgtagagatatgggtctttctatgttgcccagactggtctcccactcctggcctcaagtgatcctcccatcttggcctcctaaatagctgggactacaggtgtgcaccaccatgcctggctaatgttttattttgtagagatggagtctcactgtgttgcccagggtggtctcatcctggtctcaaacgatccctctgccctggcctctcaaagcactgagattgcaggtgtgagctgctgtgcacagcccctacttttcagggacctgccctggggctcagccaccctcatattccagttggttcccgtggtgacatgcaagccactgtccccagcccagatgtccccagagcggcgaacagcgcacctgctcctcgcgcatggcctgcagcttcttggccttgctctgccggtagtactccatgatcatcatggctgcgtagatcttccccacggtgaggtccgtggctgggggcacacacacggtgagctcaccaagggcaggcctctttggggcccttgtcctgggtccctgtgtataccagcccaggccaacactctccccaggcctcccctttccctccccctccatctgtcctggtggattggatcccagggctgggctcagctcttacacttgtgaggtgtgaccagcaggtctagcgtcttctgggacagattgggccaaatcgccatcatctccttccgcagctcagcgtccatctgctgtttgtcggctcctcctgcaatgggggtgtagacagaccctgactgcctgcctgggtgtcagctggactctgggtcagctgcaaagccataggctcccgagaacgagaccccaatctttctggtccccatggggtctccagttccccaacggcctggcccagaggaggccctgggcagtgctgctggaatgaccttgtgggctctggttttcggtggggccaggaccatggagcagctgtgcaggagacagcccggcatggagaacagctgggcgacctgggtcccaatcttgtctcccagttatcggctgcatgacttaggttactctaccacttagtaactcagtttctccatctgtgaaatggagatgatagcaagagtacttgcctcacctggttgttgtgtgtgtgtgtgtgtgttttttttttttttttagacagagtcttgctctgttgcccaggctggagtgcagtggcacgagcttggctcactgcaacctccgactcctgggttcaagcaattctcctgtctcagcttcccgagtagctgggattacagacatgcaccaccatgcctggctaattttttgtatttttagtagagacggagtttcaccatgttggtcaagctggtctcgaactcctaacctcgggtgatccacacgcctcggcctcccaaagtgctgggattacaggcgtaagccaccgcgcctggctggttgttttttttttgttttttttttgagatggagtttcactcttgttgcccaggctggagtgcaatggtgcaatctcagctcactgcaacctctgcctcctgggttcaagcgattctcctgcctcagcctcccgagtagctgggattacaggtgtgcaccaccacgcccaactaattttgtatttttagtagagacggggtttcaccatgttggccaggctggtctcaaactcctgacctcaggtgatccaccctcctcagcctcccaaagtgctggcgattacatgcgtgagccaccgcgtctggcctgttttttttttttttttgacagagtctctctctgttcccaggctgaagtgcagtcatgtgatctcgactcactgttacctccgcctcccaggttcaagagattctcccgcttcagcttcctgagtagctgggactacaggcacgcaccaccatgcctggctatcacctggttgtttgatgatcaaagtaacgtgcgtgcagccttgggacagtgtctgccataggattattactgcagtgacccatctgttcaaggctgggacgccctggagcatccccaacagaggaagttttggttttggttttattttgatttttgagacagggttttgctctgtcgcccaggctagagtgccgtggcacaaacatagctcactgcagtctcgacctcctgggctcaagatcctcccacctcagcctcccaaagtgctggaattacagatgaaagccactgtgcgtggctcagaggaggtcttttcccctttcccaagtctccactgccacggacatgcccttggcctgcagccagtccctcgtccctcaccccagtcatggggtgagtcattaaagctctctgacggtgtttcctggccctcctacctgagtacatgggggggttcctcctgtggttggcagggccatgtgatgagtccttgctaatggggtgtgcaccatgtaatgtgccactttggggccagagcatttattattatttttattattgttattatttttgagatggagtctcgctctgtcactcaggctggagtgcaatggcatgatctcggctcactgcaacctccaccttcagagttcaagcgattctcctacctcagcctcctgagtagctgggattacagacatctgcctggctatttttatatttttgtagagacagggtttcaccatgttggccaggctggtctcgaactcctgacctcaggtgatctgcctgcctcggcctcccaaagtgctgggattacaggcatgagccactgtgcctggcctattattttttttaaaaatttatctatctatctatctatctatctatctatctatctatctatctatctatcatctatctatcgatcgacagggacttactctgttgcccaggctgtggcacaatctttgttcaccgaagccttgagctcctgggctcaagcaatccacattctgacagtcagaatgtcactgtgggctgctatttggatatgctaactgggtttacgtttaatatgctaattggttcaggcaggtagttggctctgccctcaatgcctggggtggggggcttgaaagaggatagggtccagcctggtcaacatggtgaaaccagtctctagtaaaaatgcaaaaattagctgggcgtggtggcgtgcgcctgtaatcccaactactcgggaggctgaggcatgagaatcgcttgaacctgggaggtggaggctgcagtggtgagttgagactgcgccactgcactccagcctgggcgacagaacgagactccgtctcaaaacaatacaaaacaaacaaaaccaaaaccaaaatagagattcttctgggcagagagaacagaggggtgggtgggagagagaaacagatggacagggaagagagagagagagacagagacagagagaatgagatggacttgccccctttctcccagtctccagcaatgaatggtgacaccatttttgagaatctgaagaatgaggttaatctgtaccccctttgcagccccttagcctgctggaaaggaagctcagtgtgcttagaaagtgagctgaactatgaaaagaaagcgcgttatgttctcctgagacccgcatctgctcaaagggctgccactgttatcactcttccattgttgtccccacaccctcttgaccttccgtaaccccgagagcctggctcagctgtggaactccaggatgaggcctggcacccactgaggacaagaggtggaggggctcctggctgagaaatctgggggatcattgtcttcagggaactgagtggcatctggggtacaagtaacaactgtgacagccaaattcagagacatctccaggagtctttgaaaccctcaggaagggaatccagtaggtgtcatagaagctggggtgctaagcagtaaggactagctcagtaggctagtgttgtccaaaccctgcacattccgatgaaaggactggcccattgacttgctcctgggaggtgatctctaagcctttgaaatgtcctgcctgaagagtgtctttatttagcagggggccttgggccacactgtatagttcattcttttttttttttttttttttttttaaaaaaaagagatagggtctcactatgttgcctaggctggtctcgaactcctggcctcaaacgatcctccagcctcagcctcccaaagtgctgggattataggcatgagtcactgtacccggccaatacagttcattctatttatttatttattttgagatggtgtttttgctctattgcccaggctggagtgcaatggtgcgatcttggctcactgcaacctcggcctcctagtttcaagtgattctcctgcctcagcttccccagtagctgggattacagccgcccgccgccacgcctggataattttccatacagttcattctaacaatgcgatttatcgttggggtcttgggccacgtggtatcagtttgacctctggagggactggagactgagtaactacgtcagccctgcctatatgacaaaccctcaataaaaaccctggggcaccaaggctcaggtgagcttccctggttggcagtacacggtgcgtgttgtcacacactgcagggagaattaagcgttgtctgtgcaactccactggaggcagacaactggaagctcgcacctggtgtctcctggacccttccccagatgcccttcctttgcgcattttatgtttttggaatttgtttgtttgtttgagacagagtcttgctctgttgcccaggctggagtgcagtggcgtgatcttggcttaatgtagctctatctcctgggttgaaaggattcttgtgcctcagcctctggagtagctgggactacaggtgtatgccaccacacctggctaattttctttttggacagagttttgatcttgtcacacaggctggagtgcaatggcacagtctcagctcactgcaacctctgcctcccagggtcaagcgattctcctgcctcagcctcctgagtagttgggattacaggggtctggcaccatgcctaatttttgtatttttggtagagacggggtttcgccatgttggccaggctggtctcaaacttgtgacctcaagtgatctgcccgccttgccctcccaaagtgccaggattacaggcgtaagccaccatgccaggccctttgcagattttttttttttttttttttctaatagagtctcactctgtccagcctggagtgaagtggcgggatctcggctcactgcaacctctgcctcctgggctcaagtgattctcctaccttagccttccaagtagctgggattactggcgccagccaccacgcctggctaatttttgtatttttagtagagacagggtttcaccatgttggtcaggctggtcttgaactcgtgacctcaagtgatctgcctacctcgccctcccaaagtgctgggattacaggcgtgagccaccgtgcccggccctttgcagattttaatctatattctttcactgtaataaactgtgagtataaaaacttttctcagttctgagttcttccagggaatcactgaacctgtgggtggttttgggacccctgaacacagattctcagagtgccacagaagctgagttacgatggcattacatacaaagagtgggggtgttgttagacccgttgtacaaacgaaggaactgtggtaggcagaattcaaaagctgcccttctgccaagattctgtttattcaaacactaatctagggaccattgcccaggctatgaagggactttgcagatataattaaaataccggaggcccggtgcggtggctcacgcctgtaatcccagcactttgggaggccgaggtgggcagatcacgaggttgggagatcgagaccatcctgctatcatggtgaaaccccgtttctactaaaaatacaaaaaattatccgggcgtggtggcacgcatctgtagtcccacctacttgggaggctgaggcagaatcacttgaacccgggagatggaggttgcagtgagccgagattgcgccactgcactccagcctgggtgacagaacaagactccgtttcaaaaaaaaaaaaaaaaagaaagaaaatgctgggcatggtggctcactcctgtaatcccagcactttgggaggctgaggcgggtggatcacctgaggtcaggagttcaaaaccagcctggccaaccttgtgaaaccccatctctactaaaaatacaaaaaaatttagctgggcgtggtggtgggcacctgtaatctcagctactcaggaggctgaggcaggagaattgcttgaacctgggaggcggagattgcagtgaactgagatcacactattatactccagccttggcaacaagagtgaaattctgtctcaagaaaaaaaaaaaatatcaagtcagctgacctcaaaatacagagatgatcagggtaggcctgccccaatcaggtgagcccttgaaaagcacagtattgtctctgctgggtggcagatggggaagtcagagagaatgagagcacatggaggattacatgcacttccaggagcaaaaagctaaaaagccagtgataaaacaagacctcagtcctacagccacaaggacttcaattctgccaacacctgaatgaacctggaagtagattctcccccagatcctccagagaggagcccagcttggctgacaccttgatttcagcctcgtgagaccctcagcagacagcccagtccagctttttggacttctgacctacaggactgtgagctgacaaataggtgtgtcttaagctgctatgtctgtggtcatcatatagctcactgcagccttgacatcccagtccccagtgatcctcccactccagcctcccaagtagttgggactacaggtgcacatcaccacacctggctaattttaaaattttctgtagagatggggtctctctgtgttggccaggctgatcttgaactcctggcctcaagtgatcctcctgccttggcttcccaaagtgctgggattacaggtgtgagccactgctcccaacttccttgtgctctctttaccttcactttgttcctggcattaacaatatctgtcctccacccctccagtcccccaccttccctgccacttcctccttgagtcttgccacgtggccttggctcttcctcccttctttccctcaagaccctggaaggcacatatgtctcgaggctcagtcttccctcctcctgacttactagtggtttcagctgggctcagcaccttcccatgtgtgggactatccacctgctcctctcccacccactccttttttctggtcccatttgttttttcttttctttctttctttctttttttttttttttttgagacagagtcttgctgtgtcccccaggctggagtgcaatggtttgatctcggctcactgcaacctctgcctcccaggttcaagtaattcttgtgctcagcttcccaagttgttgggattataggtgtgcaccaccatgcctggctaatttttgtatttttagtggagatggggtttcgccatgttggccaggctggtctcaaattcctggcctcaagtgatccaccttcctcagcctcccaaagtgctgggattacaggcgtgagcctcaggtccccgtttcttctggcaattgtgcgcctgtctctctgccctgctgtccttaatcagctgccaaatcacatcacatcccctttcgggcctccgaaatgcactccagacaggggacccctgacccctccgccaaagctgcactggtcaaagtgaccatgatgaccagtcacttgtgatccttgtcatccttggtctctgggcagtgcctgacacggttggtccccttcctcctgaagccgcccttttaaacatagaagctgcctccaggagcccacactgccctggtctctgcccgcctccctggcctcctcttcttctttccccctaatgatggagagtgagccctgagctaggtctttgggggaatttctcggtattttttatttttatttttatttttgagatggagtcttgctctgtcgcccaggctaaagtgcagtgatgtgatctcggctcactgcaatctctgcctcccgggttcaagtgattcttctgcctcagcctccctagtaactgggattacaggtacccgccaccacacctggctaatttttgtatttttagtagagacagggttttgccatgttgaccaggctggtcttgaactcctgacctcaagtgatccacccgcttcagcctcccaaagtgctgggattacaggcacacgccacgacacccggctaatttttgtatttttagtagagacagggttttgccacgttggccaggctgatctcgaactcctgacctcaaatgatccacccacctcggcctcccagcgtgctcagattacaggcgtgaaccactgtgcctggcctcaacaaaatgctgagattacaggtgtgagccaccatgtccagccttctcggctttttttttttttttttttcagatgaagtctcactctgtcacccaggctggagtgcagtggcacaagctcggctcgctgcaacctctgcctctcgggttcaagcaattctcctgcctcagccttctgagtagcagggactacaggtgcgtgccaccacacccagctaattttttgtatttttagtagagaaggggtttcaccgtgttacccaggatggtctcgatttcttgacctcatgatctgcccgcctcggcctcccaaagtgctgctattacaggcgtgagccagcgtgcccggcctcagctttttttttttttgagacagcgtcttgctctgtcatccaggctggagttcagtggcgcgatcttggctcactgcaacctctgtctcccaggttcaagtgattctcctgcctcagcctccggagtagctggggttacaggcgcccaccatgacacccggctactttttgtatttttggtagagatggggtttcaccatgttggccaggctggtcttgaactcctgacctcgtgatccacccaccttggcctcccaaagtgctgggattacaggcgtaagccactgcgcccagccccttctcagctttaaaaaaaatgtttttttctttttctttctgttgttttgagctaggatctcgttctgtcgcccaggctggagtgcagtggtgcgatcatgactcactgcagcctcaaactcctggcttcaagcaatactctcatctctgcctcctgagtagctgggaccacaggcatatgccaccatgtccagttaatttaatttaatttaatttttgagacagagtcttgctctgtcacccaggctgtagtgcagtggcgtgatctcggctcactgcaacctccgcctcccaggttcaagcgattcttctgcctcatcctccctagtagctgggactacagtacccaccaccacgtctggctaaattttgtatttttagtagagacgggggtttcaccacattggccaggctggtcatcctgacctcaagtaatccacccaccttggcctcccaaagtgctgagattacaggcgtgagccaccacgtcgagcctacccctagatctaagctgccgccctgtctccacccagatgatatcagcagcccccacactggcctcctttcggtctcccatcccctcagtggccggagggaacctgttcaaatgtgagttgggtcaggttcctcctctgctctgaacctgcgtggcgtgccctcactcagaaggtgagtcagctcaatgccccgggtgtcctgtgttcacccctctgtcagggcctttgccagtccttctgcctggagcaccttccccccagggatccatgagacactgccttacctcctcagtggcggcctccccatccatctaaagtgtaagctgctgggtcctcccctgcttggacgggtctctggcacattgaaggagtgcactaaatatctgccaaatgggccgggtgtggtggctcatgcctgtaataccagcattttgggagaccaaggtgggaggactgcttgagcccaggagtttgagaccagcctgggcaacctgatgaaaccccatctctataaaaaatataaaaaattaggttgggcatggtggctcacgcctgtaatccagcactttgagaggtcgaggcaggtggatcacttgaggtcaggagtttgagaccagaggtcaggagttcgagaccagcctggccaacatggtgaaaccccatctctacccaaaatataaaaaattagccgggtgtgctggtgggtacctataatcccagctacttgggaggctgaggcaggagaatcgcttgaacccgggaggcggaggtagcaatgagccaagatcacaccactgcacttcagcctgggtgacagagggaaattgtcacaccaaaaaaaaaaaaattagccgagtatggtggtgtgtgcctgtagtcccagctactggggaggctgaggtggaaggatcacttgagcctgggaggtcaaggctgcagtgacttgcgatcatgtcaccgcactgctgcctgggcaacagagcaagactctgtctcaaaaaaaaaaaaaaaaaaacaccaaaaccccaaaccccaaaaaaccctgtggaacgaatgaatggaagagtgaatgaagatccgggtggtgacagcagatcctctagtttggggtagggagggagatccccggttccaccctgtcacgcctgtctgtgcccgcccctgtcccttccttacccttggcaatcttgatgtccagggctgtgcggatcagagccatgagggtggaattgaagtggacggtgttgtcatctgcgacgggcaggtccatccgcagaagccgctacagaaaacccaaggcaagcgcagtcattcccaggcatccctcctgggtctcccgtgagccgcgcccgcccctacccagggagtcccaggaagaactctgaaagctgtggcggctgaggtgtctcttacttaggttacctgtcccagtactcagtttctcttggtggcccgcagggagggcacaaaaggctctcttgtacttctggtcccctgccctctccttttttcccccacctgcttgacctgagagctggcatttccagggtttgcctcaacccttgccccacccccgccctgccccagagttcttctggatggccccgtttcagtctgaccccaaagaaaaagagcacaagctggatttgagcagtgcatgcaacagccaaggctgagggggccaggaccacagccgctggtggggggtgccactggctccccacacccaatccctggcttggcccagaccaggacagagcagatgggcacagaccacatcattcctctgagaagcagcaggcaggcagccccccactgacggggcaggcccctcgcaggcatgcagcgaggctgtgacacagaacagcacagacaggggcgcatgcagacggaatctcgagactcattcatagctccgtgggaagtgtatctcaggggcatgtccagatcttggctctctgtgcaatggcagggggaaggggtgaggggcactcccttccagcccagggaagaaaagattccccatgtcccaggcaggggctctgtccaccatgcttggtggcatgggagaggatgctgggctggtgtgcaccagcccaggctgaagtggcacagagaaggggggtgagggcaacttgggtggggattcagacacaagtgggcaggaaacacagagttgaagatggggaggggtatggtaaatccagagcaggacactggaggggacactgggggtagggtggggaaggaggtgggaaatagagaaacacacatagactgggccactgtgcacagttgtgcaggttgtacaccgcacaaagggctcccatcttggaaatgatagatttatgtacttatttattaattaaaatattttttctttttgtagagatggggtctcgctatgttgcccaggctagtctcgaactgggctcaagtgatcctcccgtctcagcctcccaaagcactaggattacaggcatgagccaccacgcccagcccccgatttgtatattaaatataacagcttcccaggtgatagaaaaaaagtgtcttgttctcaccacattggtagattgcaacaattttccaacaggcatgttctgtggaaagggtgcctttttcaaatttgcacaaagttgtcttatggacccatggtggtcctgcacaaagaccaggagaggaagggctcgccctccctctcttgcacatgcgcacacattcatctaagcagagactgagagaagcgacttgaggaaaaccgggggggggggggggggcggcagggaggggcacagagcgacaggtgccaggagaggctcattgtctgagatgctggtgggacaaccttgtccccggctttgattgagaaggaggggagacatataggttaggtgaggaggggtgcacagaggaaggaaaggaatgaggtggcaacacggggcaggtacaaatagcattgatggatagggacgcagggaagatcaaggtggatgggagaataggatgatggggtaatactttttgggtggggagaatctttaaaggtcatccctgaacttcttgtggatgaatggagggaacagagcatctgtccttgggcaccaagggagattccaggacagggatctggaggggtggcccgggccagccgcttggcggcaggacgctcgctctctcagccagcatgcaccaccccccgtcggccatggtgcctgcccgccccaggccccgccaaggcagcgtgcatggcctgcatcagtgtgccaccgtccaggggtccagctgcggccgcctgcccactctggaacaatggagaggcatgttggggtgtcttggggggattagggacgggggctggggacgaaactccaggggaaggaagggaggggaagagaggttcttggtgctccttggaaggtctcgaatccccaaggccctaggtcagagatcagcttcaggtgtgcgtggcaggggcggggacccgggacctcgcctgctttcgggggctaaagcccctctctgcaaggcgcctgccccagcctgggcatgggggccgctctgggtgggcagaagtgggaagcatgggttttgactccctgaagaagcgtgtttgtttccaatttggtacctgggagaccaggtgcaaggggacctgggcgctcccctccccctccccccggcatgtcggccataatggagtctcaaaacacgaagacactcatcagaaaggacggacacagtgtgctgcttagaatcaagggatggtcatgatcagttgactcgagaaaagaaaaaaaagaatcaaaaacaaaaaagaagagaaacgttggaaaaagagagtcggccgggtgtttctggtcagcactaaaaaaaaagaagaagaagaagaaaaaaaaacccagtgcctggacgtcggtggtcggcaagggtagtctaccttgtaagccactctggccggacacttcttccccagacccaggggcggagacatgtgtctcagcatctgatacatgtccaggtaaggcatgcggcccctggcagcaccgaaaatgaaaaaaacaaaaacaaaaacaaaaaaacaaaacgggaatgggaacagagaaccaaaggaagagaggtggggagaaacagaagaaagaaaaaagaaatccacacgagccgaaaaaatagagagagaaagatgcagagaatgataaaatagatatttcaaatcaatggaaaagaggaggaaaaaaaatggaagaaaaggtcagtaaaaaaagattacttcactgctcgggagcagggagagagagagaaaagagaaaagtcagattcagcgtgggctctgagctacagttctggagggatgcggaggggagggagaattctcactttggaagacgtagagccatgcttttgttcattgcctttttttttttttttttttttttttaaagagacagggtctctctctgtcgcctgggttggagtgcagtggtgtgatcatagctcactgcagcctccacctcctgggctcaagcaatccttctgcctcagcctcccaagtagctgggactacaggcatgcgccacaatgcctggctaattttttatagagaagggggttcttgctatgttgcccaggctggtctcaaactcctgggctcaagcgatcctcctgctttggcctcccaaagtgctgggattacaggcatgagccactgcgcccggccatcactgttatttctacagttgggtcacgttctctggtttggctgaggctggtctctgagggggcctaggtggggagcaggggccagtgccagggaggggaggagggctaggggctttgggaggtgaggggtggagggggagagagtggaggtgatggttgggggagaaatgcaaagttacaatcccccaggggatgtatctgatttggggtgccgtggagaccccaggatgggcagcttcagctaagagcaagcaaagatggctgaaggctgaagggaaggaggaaatatgttccatgctttatcgagtctacatgactgcattctgttggctaagagagttttctagtttaatgcaagaaagagagatggctctgtttttttagagagagagagagatatatatatatatatatatgaaatatatatattgaagaaccccaagccacactcattccatggatgctagcaggttttagtggaagtcaaaccttgcaagcaaccctatgaggacatttcttgcctaagccgagagggggagatattactcgtaataaactgtacatatccttataatgaatccgaccgctgaaaggagaagaaagggggttagtgcaggcaatgggttcacacgggctccctgggcacacagcgaggtcatgatgcccgaggctggggtgtccctggcttgaaggagtgggagagactggggacaagtgaaggtccccagtacattcccagacactggggagacccaggggtgtaggatgtcagtcgagttcgggactgcagggcacctcccctggggctctctctgcatctgcctcctccacagtctacatgggctacaggggtgggggggggcttgtggaatagaggccttggggacagcatccaattgctgtgacctaaaatcaaaagaggaagagttaggaaccagccaaagcccagccccagacccacggctctccccagcctctcggtctcatggagtacttgtttgaggctatgggaatagccaagaccacctcctgcccaccttcctcgtgacggcctcctctctggtgctgaggccagaggaagatggggcttaggctgctgagggccccccagtaatgcttcttcaggccccaagaccagcctgaactaaatcctcagttagtggctggtgggttccaggtattcagataaagcctctgagtgtccttcaaggcttggtgttgggtgggcactcaatacacgtgcacaaggtggaacccaccctctgaaaccattgcccgtcagtggagagggacccctctggtgtctacccagatgggagcgcccactccctttgtggccacaaagatgcatgggcccctgaggctctgcgtcctcccctggcctgtatgtcctctcactcccaggttcacgggtcccagtgggagctgagttctgctactctgatgttgctgccaatcctgtctgccaagggtaggccagccctcctccccacactctcaagagaactgaggctgggatgctgttggttttctccctggagcctggctaatgcatcctcaccatctggagacttcacagtgagagacaggagagactcgtaggaggagagggctcttcaggacatctcatggttgacgccctccctcatttcccagaaagtccagggtttgggcagggttggcaccctacgtgtttaatctggggtatgcaagggtgatgattcttatatcttctctcctgactgaacctgtgagacccctgctaggaccccaggagttcagtgctccagagtctggggcctgacctagcccgtgttccagttccagggagaggtgagtattgtggctggaggattcggggtgacttcttaccaagctgcggggtcatactcggcccagacacgcacgtactcatccaggtggtgggggcccaggatggaggagtctcgggtgaggtactcaaagttgtccatgatgacggcgacaaagagattcagcatctgtggggaccccggggaccaagagagaatgggggcagagaccgagggaatgaatgagtgagtgagaaggatacagacagacagacggacagacagacccaaagacatgtacacagaggcccagatggagagagggatagagagaagatggggaaaggaaatgagacagagacagaaagagactggggaatggagaggtgatgctcactcacacaaggaggtccagtgagagagagatcaagtggagagatggggaagaggaagagagaaacagagagagatggagagagagagatacaaagagacaaagactggccgggcacggtggatcacgcctgtaatcccagcactttgggaggccgaggtggacagatcacttgaggtcaggagtttgagaccagcctggtcaacatggtgaaacactgtctctactaaaaatacaaaaattagctgggtgtggtggcatgtgcacctgtaatcccagctacttgggaggttgaagctgaagaatcggttgaacctgggaggtggaggctgcagtgagctgaggtctcgccactgcactttagcctgggcaacagagtgagactccatttcaaagaaaaaaaaaaaagagagagagagacaaagaccaagaatgatggaaagaaacagagtcagtgagagggaggggaggcttctgaaacagggaccaacaccaagagaaccactgtgaccccaaatcctcccacatctgcccccaacaaggccaaagtgaggtatttcttccctcgcaatgttttttttttttttgtttgtttttgtttgtttttgagacaggatctcattctgtcgccctggctggggtgcagtggtgtgatcatggctcactgcagcctcgacctccaaggctcaagtgatcctcccacctcagcctcctgagtagctgggactgcaggtgcacagcaccacgtgtgcagctaattcaatttttttttttttttttaaagagatgggtttcacaccatgctgtccaggctggtcttgtattcctgggctcaagtgaccctcccacctcagcctcccgaagtgttgggattacaggcatcggccactacgcccagctgaaatatttcattgagtctcaaatgggggaattctggcccccactcccaaccccacccccaccccctgggggcacctggcaatgtccggagacatttttggttgtcacaacaggaggaacgggtggcgtgtgctgccagcatctggtggggggaggacagggatgctgccatacactgcagtgcacatgatggccccaccccaaagaatcagccacccccaaatgtcaacagtgctgagtttgagacgctcagggtcacctgatcccaggctggttcagagaagccttggagggaacaagccttcgacacagccacattccacagaaacccactcccctgaaaggaagccaggcttagggagcccagacggccctcacagtgtccacagactcaccagaaacgagcagaggaagatgaaggaaacaaagtaaaaataagcaaattcattgccacactctcgagtcaggatgccagagttcttatcacacggtttcccgctgaggcaggaaagcatgatgttgtgccaagcttccccggtggcactcctgaggacagggagaaatcagagactcggacacccagccctgactgggtaccaacgcctccccaggaggtggagcacacacgttgagcacttgggctctggagctggccaggcaagccccaggtggaccacctccttttactgggagctgagagaagggaattcacattcttggctgtgcactgaagtccacagagagctttgaaaaaataccaatgcccgtgccccaccccagcagacttggattcagttggtctagggtgggatttgaggacactgatatgtttttttcttttcttttccttctctctctctttcttttcctttcttttctctctctctctcttttttttttttgacagggtcttgctctgttacccaggttggagtgtagtggcacaatcactgctcactgcagcctcaacttcccaggctcaggtgatcctcccgcctcggcctcctgagtagctggggactacaggcacacgccaccactcctggctaatttttaaactatttttttttgtagagatggggtttcactgcattgctcaggctggtcactgttatgctttaaaagctcccctcttggctgggcgcggtggctcacacctgtaatcccagcactttgggaggctgaggtgggtggatcacgaggtcaggagattgagaccatcctggctaacatggtgaaaccctatctctactaaaaataccaaaaatttgctcggtgtggtggcgctcacctgtagtctcagctacttgggaggctgaggcaggaaaatcgcttgaacccaggaggcggaggttgcagtgagctgagatcgcgccactgcactccagcctgggtgacaaagagggagattctgtctcaaaaaaaagcaaaaaaaaaaaaaagctcccttcaggccgggtgcagtggctcatgcctgtaatcccagcactttgggtggctgaggcgggtggatcacctgaggtcaggagtttgagaacggcctgaccaacatggcaaaaccccgtctctactaaaaatacaaaaattagctgggcgtggtgacgggcacctataatctcagctactcgggaggctgaggcaggagaactgcttgaacctgggaggcagaagttgcgccgagccgagatcgcaccactgcactccagcctgggcaacaagaccgaaactctgtctcagattaaaaaaaaaaaaaagctcccctccatgaaggtgacagtcatctcatactatattctccctagatcactctgttctaggtatgctgggctcctcacagtcctcaaacatgccagccatactcctgcctcagggcctttacacaggcagtcccctcggcttggcctgcccttccccatatacccactgactccctcccttgccaatttctctcaaatgtcacactttcagagaggcataacctgccggccctctattctttttttgttgttagattaaaaacattattattttttactgtggcaaaatacacacagcatgaagtttatcaatttaaccattttgaagtgtacaattcagtagcattaagtaagctcacattattatgcaactatcaccactatctacctctgtaactttttttaaaaattaaaaaaatatatttttctttttagagacagagtctcgctctgttgccgaggctggagtgcagtggcacaatcatagcttactgtagcctggaactcctgggctcgagcaatcctcctgcctcagcctcccaagtagctgggactacaggtgtgtggcactatgcccagttaattaaaaacaatttttttgtagagacggggtctcactatgttgcccaggctggtctcaaactcctgggctaaagcgatcctcccacctcggcctcccaaaatgctaggattacaggcacgagtcactgcacctggccctattcccctttattcttgaattttatctttttccagcatcctctataatttgtttcctgattattcgtcttccccatggggatgttagcttccaaagtgcttaaaatgtctcttttctctatttcctggtgcatcctcgtttttcagccctgcctggcatgctgtaggtgctcaatacacctccacaagaggagcttgcagtgagccgagatggcgccactgcactccagcctgggcaacagagagagactccatctaaaaaaaaaaaaaaaaaagggctgggcacggtggctcacgcctgtaatcccagcactttgggaggccgaggcgggcggatcacgaggtcaggagatcgagaccatcctggctaacatggtgaaaccccgactctactaaaaatacaaaaaaattatctgggcgtggtggcgggcgcctgtagtcccagctactcgggaggctgaggcaggagaatggcgtgaacccgggaggcggagcttgcagtgagccgagatcgcgccactgtactccagcctggggaacagagcgagactccatctccaaaaaaaaaaaaaaaaaaaaaaaaagcccccccaaaaaacctacactgaacgagtgaaggaacttttgtgtgcagccaagatgatgaaccaaagaatcaagcctcacggtctgtaagcctgttttcttatttgtcggatagggctgccaagaatcccttcctcacagggtggtcaggaagattcagagataatgcctggaaaatgaccttgatgactatgtcccagggccctctgcttctgccctgctaggattcctgggccccccacgacacccatttccagcctcacgggaaaagaaggataagagcacatctggccacccccacaccagaaaaggaggaggagggcacgccccctatcggaagagaaggccggcacgtcccctaccggaagagaagggcacgccccctaccggaaaagaagggtgagggcgcgcccctgccagaagagaaggaggagggcacgtcttgcattggaagaggagggtacatcctctatgggaacagaaggatgaaggcaggcaccccaccccacggaaacagaattatcagagcaggtccccttctcaccggaagagaagcatgagggcctggaagaaggtccggaagttattgtgctcagtgatttggaactcatcttcatcactgtcctcgtcctccacgtcgatgccaatgttaccaaacacctgtggaattggagggtgacgaccaggggctgccattcctccagtggcttctgggaaacccagctcaacctccatggctgcttctgtgaaccaggctcctctgacccacccctttctaagggtggctgccctccttgggaggctctgggaaccttagggacacgacactcacctgcatcccaatgatggcatagatgaagaagagcatggcgatcagcagacagacataaggcagggcctggtgggaaaaaaggcaatgaagaagagtgctgggggtccctcagccgcactgtcttcctcccttgtcccagtgctctgccccactgggttgggtggccatatgccacgtgccagagtccttccagggctggtgggcatctctgggggctctaggatgaggcccttacagctctgaagacacaccagggacaggaagtttgacaacagccttggagataacagattctctgcacgactacatcacagaggcacttccaatctgacttctacattcagccagagcatgagggtcacctgtcttctcagccctgggccagcagcagggacgaggactcaccttgaaggactgcacaaaggtccagagaagaatgcggatggtgtaaccctgacggagaagtttgatgagccgggcagctcggaagaggcggagaaagctcaggttgatgaagttattctggggagatggaggaagaggggtgaccatccacccaccccaaaaggctcagagctgtcaccactcacagaggcccctacatgaagccaaccaacaggaaaaaagcaagccagaccccaaataaggagggagagagaaagcactattaatgcaatgatgcagaggaaaaactcgaaaaaggaataatgttgggagagagagggtgggagggaggaaaaggcatcaactcaaaagcataagccctccctgccagccccacccacaatggggaaaagaaaagaaaaagaaaggaggaaaaaggaacggggatggggaagaaataacaaaagaacaagaaaaagaaaatatatccgaatcatccaatcaggaaaaaaatcgagatggtttttgtttctcccaacaaccaaatgcactgagacgaaaggacacaagccggtcaagttgcggaatctatcatacgtgtacgatgcacaaacaccagggcgggggtgggggtggaggtcgccagcacagtcaggcctggtggacatgtgcgggttccgagggcatgttacgctccgggccagaaatgcatctgtcacgggactcaccgggcaccctgccctgccctgccctgccgagctgcccacccgctcctgcccgccctgacctcaccccacggccaagaggagcagcggctcgagccaattgggagaagcggaagagcatcttttcttacccccttggcgagcgggaatggggaggacgggagggagctgggactgttcggctgcagggtgagtcctcgctgcccgctgagtcggagaagatgcatttggggcccttttcccccctctcagggatggcttctcagcttctggggctgggtggagtagcacgggaccaggcctgcaggaagcaggaagcactcagctcccatgggtgggtgagctcagaaatcagcccgggcccaccaaggggcgggtgctgggggccgggaggtggggccatccctgcccccaggacctccctgggtggccactgcctctgctcaaaaaccccctgtctagtcactgcctctgcctcctcccacccaagctagaagaaccagggggccagagagttggagagtcagggaggagaccagctagagttaagtggccattgtggggcttcaagggaccttggtggggggggtgggactctcgaagtcacgagtgggccaaatctagctaataaaactgttttgttgggcccgagcagtgttttttcatttgtccttgtttttaattaaaaattattgccattgtttaaaaatcaagagattttgcccaccaatctggctttctggcaaccccaggcctgctgcgattgctccctggaagcaggccacatgatctccagttttccagggtcctcacgttttagaaatggcacttgctttcctggttgactggtgtctgcctggcccccagaggcatttgagtttgagaccccagcctcaggcagacatggaaaccctccttcgctggccagtacccagcagggtgaaggcaggaggagtagagggtctctccacactaagggaaggggcttaatcagacttgttctatgggatttgtaggatttgctacaggccacgtagcaagatttaacttggtctaaccttcaccccccaaatggcacagggtgaccatacagtcacagcctccctcctgtttcaaaagtgtcctagtttgggtgacatgggcatcctacttggtggcttccagagggctttctggctgccagatctgtgtcttgtgctggctttggcctgggagctgagaggcaaggactggagttcaaggaatttctgaggcctctgggtttgatggcaatgtctaggatgctctctgggacacatcagtgcgtccttaggcctctaggatggggaagggggctgggggatcctaccctgaccacactgggctcaagtgctgtgagaatgtctccagtgcctcgaacaagccccaaacccagcttggctaacagagtcactctctgtgccctgctgccctgacccccatccctgcctggccacccagctccacctggggatggggccgatggctcaggtatccccagccccctcccgttcaaccccagagtacaagccatccctttcatggggcggatcataacatgtggactcggccaggcatgcgaaggcaggcggaccctggaagcagcctcaggaggggggtttggaggagagcaggggaagcttgcaaccatgcaaaaaagccagggatctggcagggagatgcgtgcagaaaacatgcttcccttcttggagccaagtgggggaggagacacatgaggcaggtaggggtggagacgggaagggtttggggcagtgggggaagggtactagtctgccctcatccaccctccatctcttcctgcatcagtaccaattctttccactgcccccagaacttctgacaagttccctcttcctgccttccacatttcaatccatggcttgggaggtgcagcttcctctcttcaacacctcccctgaacttcctggctagaatgtgatgggggtgggacacagcccctggaagacatgaggacagcgtccttgtggtcttttcttttccagtgctgtgctcagatgttcctcaagtgctcagaaggatatggagaccacccacctaagggctccagaaaagtcctactacttgtagacctcagctccaagctgcagcccccacaacacctgcctatctgacttatttcgggatgtcctaaaggcacctcaaacttgctatgcccacacctattctcttcccccaacctggtcctttccttgcactcgctcacctctatcacccagtattttttttttaagagagtctcactctgttgcccaggctggagtgcaatggcacgacctcggctcactgcaacctccacctcccaggtttaagtgattctcctgtctcggcctcctgaggatctgggattacaggcacctgccaccacgcctggctaatttttgtattttttaggagagatggggtttcaccatgttggtcaggctggtctcgaactcctgacctcaggtgatcttcctgcctcagcctcccaaagtgctgggattagaggcttgagtcaccgtgctcagcctatctcccagttttaagccagacccgactgctcccaggcacctcatctcagttcagacctgatctttccctgggtcctgcagaggacaaccctcccactgttctctctcctccactgtcatctcttgctgcgattcctggtgcccacctccagcccagcctcctgtcaagctgttccctgccctgcaaccagagcgagcttgtctagtcacatgaccagtcgcgcctcccctgcttcctatcctcccaggcccttcctggtgcttaggagaaagcccatattccacaatatagccccgccctccccagccccgggtcctgtccccttctgccttcttcggctgtctccaggccagcctttctcggctgtctttgcatcagccacattccctcgcttgcagatcctgacccctcacaggttccgtcccaccacagggcctttgcatgtgctgtcctgggcctggaatgctctgtgcatctctctctgccttgttaatgctgctcatccttcagctcgcagtgcaggtataattttaagtggagtcaaggggttatttgaccgatgcctgcctcccccacctgactgtatgtggtaagaggggacagtaatggtgtctgcttctgcccataattccatctgtggcaccaaataggggctcattaaatgtttggtgggtgaatgcatgtgtattgccagcagggaagggatgattccagggcaaagatgccattggggcgtccctctaagggcctcattggtgggtaggagaggggcagaggcagttgagatttaacagaacaaggggtgtgcaaggggctgagaagtgggggagggagagagatgtgtgcagtatgtactggagtgggggtacagggtgggtagatgtagcagagagggccagtgtgtgtgtgtgtgcatgcgtgcatgcatgcatgactgtatgtgagagacacagagacaggaacagtgaatgaggattagaggccaggtgtagtggctcacacctgtaatcccaacactttgggaggctgaggcgggtgcatcacttgaggtcaggagttcgagaccagcctggccaacatggtgaaaccctgtctctactaaaaatacaagaagtggcctggcgtggtggtacatgcttgtaatcccaggtactcaggaggctgaggcatcataattgcttgaaacggggaggcagaggttgcagttagctgacattgtgccactgcacgccagcctgggtgacagagcgagactctgtctaaaaaaaaaaaaaaaaaagagcgagagagagagagaattggagaatgagtgagaaaaagagaagaggtcatgactatgtgcagtgtctgtacatgcagtgactgtgtgttcagtgtgtgggtgcatagactgtgtgtgcagtgactgtgtgtgtatagcgactgtgtgttcaatgtgtgaatgcagactgtgtgtgcatgcatagtggctctgtgtgcagtgactgtgtgtgcagtgtgtgtgcatagtgactgtgtgcagtgactgtgtttgcatagtgacagtgtgtgcagtgtatgtgtgcacagtgactgtgcagtgtgtgtccatagtgactacatgcagtgccagtgtgtgtacatagtgactgtgcacagtgtgtgtgcatagtggtgtgtgcagtgtgtgcatagtgactgtgtgtccagtttctgcgtgcagtgactgtgtgtgcgcagtgattgtgtgtgtgcagtgtgtgtgcagtgtctgcgcagtgactgtgtgtgtggatagtgactgtgtgtgcagtgtctgtgtgcagtgactgtgtgtgcatagtgactgtgtgcagtgactgcagtgactgcgtgcagcgtctgtgtgcagtgactgtgtgcacagtgtgtgcgcagtgactgagtgtgtgcacagtgactgtgtgtgcagtgtctgtgtgcagtgactgtgtgactgcgtgtgcacgtacagttcaaggctccaggagagggcctcagtgggccagccccacatgaagctaccagatccaagtctggcacttctgagttcctctgcctgagagtctttgccggcacactgcctggccttcaggtctcctttatcagacttggagagtcaagtctctgctggtcaaggccaaagatcttgtgggcttgagatggaggattggggacagcaggatggagagagctggaggggcgaggagacagttggcagctttcctggggcctggggtccatggagctgaatgggggacaggagtggtgagaggtggctgggagtggatttgcctctattgtctctgagtgtaggggatgtgtgtgcgggatggggcaagagagaggtgctgcgctgggaaaacccatccctttctctgcaaaagacgcaaaccaccccaaacagaaaacccccattcagaacccgataaaaacagagagacagagtctacaggaagtgggaggcacaggggctgggggcgggaggacagacagacagaggagagcggagggttgaggagagcgtcaggcatcccacgttggagaggcagggtgtggcatgcaatgccgacgcgaggagatgcgttcacagttaatgtaaggcatttagacttcagaaagaagtaagaccaaccggattctagatgcagatgttgaagatgagggggagcgggcgggcgggggcagttggggaggcgtgttcagcattttttaggttgatttgtaaccagtgccaaaaaaccaatgggtttcggttcccgggcggggagtgggggtggtggtggcggtgggttgggagataagtcattggtgtatgaacacacagaccatgtcatggatgaacaaatgaatttcatagtgcattttgattggatgagtttttcagacggcgttgcgccaatatacagttttaagagcaggcatgaaaagagacaagacaagaaacacagtcattatccattgcacacagggcaaacccacatcaccccagccacttgggggcagcagctgagacagcactggttagtactgccgcatgccctctgccccctaaaccccagggacctgcccgcccaagcatctggcatttcctgtctcagcctggccaagccctggcctcagaactagtgggcttacctgggaggcagaaaggggcaactgagacctccttgcctgccaggacatgcctctccctactccaggttgggagttaattgtcccagaaggacccaaacacccaccccctatctttccctcaaattgactgtaactcagggctggctaacaaaactacacacccattcacaataacaataacaacagcagtaatagttaacaaccaccattttcaaactcctggtttcctggcaggttctgtgccaagcacttcacgtttctttctttctttttcttccttttctttttgagacagagtttcactctgtcgcccaggctggagggcagtggcacaatcttggcttactacaacctctcgcctcctgagaatcaagtgattctcttgcctcagcctcctgagtagctgggattacaggcacctgccaccgtgcccggctaatttttgtatttttagtagggacagagtttcaccatgttggccaggctggtctcgaactcctgacctcaagtgatccacctgccttggtctcccaaagtgctgagattacaggcgtgagccaccatgcccggcctgttgatgcttttacttgtaaaaagttcccgtctctctccttagaatgtcagctctatgggagcagacactctgtattcttggtctgttttgtttggcacccctccttctcgttctgtctccagcacttataatcacaccaggcacacagtaggtgctcaatgaatgtcttttgagtgcatgcatcactgtgagtcttgcaagtgtctgaggttggttgcaatggttagccccactctacatgagaagagatagcgcaagttgtccaagatcaaacagctggtagggagggctgggggctgtttggctactgcaagggtcctgatgtcccatgaacaccccatgccccatcttcctgccagccaggagaacaggctgttggagtctgtccctacagctctcttactggtgattgaaggtttcagctaacttcctccaccccacctgcccttctggggagctggaccatccttctaacctcttgacccaaagggacattggttcaaggctgtcttgtatgtagccggatggcaagatattttgattgccagctggagctccagccctctctagaaactcaggacaggggagaatgaccaggtgggggcaccccagtggagagagcccccatgtgggcaagaaccctctagaggaaggtttcagggatagggtgaggggaaggggaaaattctggctcactggagctgaaggcaaataagtgtgtatcacttgggtgcgggtgccgtaggacatatcaaagaatggccccctcttttgtgtagttccccagcccctcctggccttctaggacggaagagcaggcaaacagatccttttctgtagggggatctgactgggacaccccaggagctgtcagtgtactctcaggagtcacccaggcctggctttgtgaccttgggagtgtctctcacttccccaggcattgaagatcagttttctttctttctttttttttttgagatggagttttcgctcttgtcacccaggctggagtgcaatggtatgaccgtcgctcactgcaacctccgccttccgggttcaagcaattttcctgcctcagcctcccgagtagctgggattacaggcatgcaccaccacacctggctaatttttttgtattgtcagtagagatggggtttcaccatgttggccaggctggtcttgaactcctggcctcaggtgatccgccggcttcggcctcccaaagtgctgggattacaggcatgagccaccgtgcccagctgaggtcagttttcccatctgtgaaatgaggcaacaccctcttcctcaggcccgaccacacccagatctattctcctgacttccctgcctgctctgagcatcatattcagcttgcttccggtttactttgggccatgggaggctctggcaggagataagggatgaggggagagaaaggttggggtgtttctcccctattgctctctgcctgcttgggccctggtctctgtctctccacattgacaggacagctcccacttggtggcttctcctggcctccggctcaggttccctccccacttcagcacctgggcaggtgacagctccccacggtgggtggtcgctggacaccttgccacccttgtgggtacccttcccttcccctccaccagtgaggtctgcatttgggtgccttcagttgaaccctccgagggaattctcttacgagctgagaccaagacctctaccctgagccaatccacgtaaaccacttggcacagttccctggcacacagcaaggctgcgattctcgtgagctattgttatttttattgttagtaagatgacattggtatcacccttgacccttggctttgacacccttttttgaccattgcttccccctgcaaggatcttctaccctccccccaatctcctgagggaccccaagcctgggctcattggcagatggccaaggagagggtctaggacaggacctctggggccctgagtcttccagaaaaggagaagggcaatgtggcctgtggggccaccacagagaggtccagagactcccatgttgagagtctcccaggcccggggctagaggagggaagacaccctggggacccctctatggccctgggagtggtgtccccacactggcctgagggctgtggctctctcctgcccactaactaggagagggttggttcaaacagaattgacttgaaacccattctttctgggctcctgacatagggtggtgtttgggagccggctcagctttcagagcttttgagtgtctcagttccctcagtgtactcatctgcattattaattcctaggccaggatgcaggaaagcccacccctcagtgctggccctacagccaagctttggttacccccatctccccacaatgccctcctgaggggctgcccttgtccccggggccccagttctccctctctggtcatggccaagtgctggctcaagcagctatggcttccgggacacactgcctctgggaccgctcccccgccccctgccgcctgcctcgtccagcccagagtcacccagagagaagctggagggagacttaccccaaactcagtcacgaggatatcggtgatgctgcccagaacagtcacaaagtcgaagatgttccaggcatcgcggaaataattctagaatggggacccacaagacagagatgccaacagagggcttggttcccggccccctaggctggccgggtgcatgttagaggcacagttgcccatcagcggagtgcccgggacagttatggttgttcgaagggctgcggtaaaggctgttcgacatcatctgtgctgagtctccctccctgggaactcctgggggccttcccatgattggcctggccccagagggggcctccagaccctgcttcagctccacagggctggggctgctcttcagagctgtggcctgtctctccagcatttttgagggctcccgagaccccaggggctttataaatgacatcactgagctcctcatgaagatcctggagggaagggttatcacccattttctttttctttctttctcttttttttttttttttttgagatggagtctcgctcagtcatccaggctggagtgcagtggcacgatctcggctcactgtaacctctgcctcctgggttcaagcgattctcctgcctcagcctcccaagtaggtaggaccacaggtgcatgccaccacacccagctaatttttgtatttttagtagagacggggtttcaccatgttggtcaggctggtctcgaacttctgacctcaagtgatctgctcactttggccttccaaagtgttgggattataggcgtgagccaccactcccaggtatacccattttctaggaggtaaccaagccactcatctgcctgaggctagcagcacagagatgtaaagccaggatttgaacccaggcctcagagagcccacagtctgtgttcaggtccccactaggttggcagcatactcgcaaagaaaggagactctgggttcaaatcccagctctgctaccacagctgtgtggctatgggcaagtggcttaacctctctgggcctccatttcctgatctggaggcggacagtaacagggtgcagaacaggcactggacggggctttggggcctttcaggcacacgcacttcctggtccccttgtgtttagatggggccatgtgtgtctaggtgcagtgatgtgctgtgtgtggaagcagtgtggtcactttctggtcagtgttggactctctagcctctcaaccctgggcttggcgaccagtaacattttgaatggcagctactctgtgagcctgggtccctgggtaactatgaggcaaacagcttccctgctgaatgtaaaaaacccttcccatcaatttaagtcactgagatgtgggggctgtttgttactgcagcttcacttgatctatcctgactgctgcattcctgggctgggtgctggctcaaggggaaacacaagcataacctctctgtttgttttttttttttgagacagagtctcactctgtcgcccaggctggagtgcagtggcacgttctcggctcactacaagctctgcctcccgggttcacaccattctcctgcttcagtctcctgagtagctgggactacaggcgcccaccaccacgcctggctaattttttgtattttttagtagagacggggtttcaccatgttagccaggatgatcttgatctcctgacgttgtgatccatccgcctcggcctcccaaagtgctgggattacaggcgtgagccaccacgcctggcctctcttttgttaaaatatggaaatactccacattgtttggagaacagtcacagcctcaagtcccacaaggtctcctgctatctctgactcccctcaaccgggtactgacatggtgatgggtggcaccccagtttggatccaagagtctgggtcaaagagatggccctcccctctggggtcagtgggacccaaaacacaaaacacagggccttctcagcatcttcgcagaagcagaggccaggtcaggggttggggcggtcagtgtgaccctgaagtagcccctctaccttacagagaaggagcctgaccttagagctgtgcttccctcctaggcgaagtgcctggggcctctgcgcccttctctggaaggcagtggtaacacagcaatcagacaatgaatgtgcgtcgctgagcatggaatatacagtaggtgcccaacagatgggatgttgttgtttcacaactgcctaaaaaaggaattcagggggccgggcgcggtggctcacgcctgcaatcccagcactttgggaggccgatgtgggcggatcacgaggtcaggagatcaagaccatcctggataacatggtgaatccccatctctactaaaaatacacgcacacaaaaatcaggcaggcgtggtggtgcgcgcctgtagtcccagctactccggaggctgaggcaggagaatggcgtgaacctgggaggcagagcttgcagtgagcagagattgcaccactgcactccagcctgggccacagagcgagactccgtcaaaaataaataaataaaaataaataaataaataaataaataaataaaaaggaattcaggtcccactggcacttttggcattttggcaggtgttgctggggccctgcccatagctcaactacacacctgaggtacactactttgcccagggtctctctgtggctgcacaagtgttagggaattaatagctcccctgggagtggcctgtgattatgtctgatgggcactggaggataaatactccaattccctccctgtgaggtgggatgactctgtggtatgtgctctctgttgcctcctggaggtatccactgaaactgagccccatttgttcacagcaggaactggcttaataatacactctttcctggttgcctttctgtccctgtgtcacttcctctctcccttactgccctgcatcccagataaattccttgcactcaatccttgtctcaggctctgcttctgggggagtccaaacaaagacaactttataggcgtttggtcacagacctcaacccctaggctagagagctcccctctatctcccaaatgttatacagggaacttgtggcttcatttaaaactgaaaggggagaccaggcgtggtggctcatgcctataattccagcactttgggaggccaaggagggagaactgcttgaggccacgagttcaagaacaggctgggcaacagagtaagatcccatctcaaaaaaaaaaaaaaaaaaaaaaaagagaaagcagaggggaagctcagtgctggctcttgcaggattggcagggtgagggagatgcagctccaggccccagtggaagactcacttcaccagcagaagatcaactcagaataaaataactgcaggctaggtacggtggctcatgcctataatcccagcactttgggaggccgaggcaggcggatcacctgaggtcaggagttggagaccaacctggctgacgtggtgaatccccgtctctgctaaaaatacaaaaattagccgggcgtgatggtgggcgcctgtaatcccaactagtcgggaggctgaggcaggacaattgcttgaacccgggaagcagaggttgcagtgagccaagattgcaccactgcactccagcctgggcaacagagtgagaatccatctcaaaaaaaaaaaaataataataaattacagattcagtgattccctcccacctcaccaaaccaaatgaatcagaacatctaggggtttgctcagggtatcatttaattttaagaaatttccctaagtgcttcttttttgatttttagagtccgggtcttgtgttgttgctcaggctggagggcagtgatgtgatcgcagctcactgcagccttgaactcctgagctcaagtaatcctcctgccttcgcctaagtagttaggacaacagtcatgtgccactatgctggctaatttttcaatgttttctagagatgaggtcttgctatgttgcccaggctggtctgaaacgcctgggttcaagcaattcttctgccttggcagaagtcccaaagtgctgggactacaggcatgagccaccacacctggcctcaagtgcttctaataagtagcatctccaccaaatgaaagccactgttttggaggaaaaaggtccattagtaggatccctttcctagcatttatttatttattttgatacagggtcttgctctgtcacccagggtggggtgcagcggctcaatcacgactcactgcagccctgacatcctgggctgaatccatcctctcacctcagcctcctaagtagatgggactgcaggtgcacgccaccacaccaggctaattttgtactttttgtagagacagaatctcactatgttgtccaggttggtctcagactcctgggctcaagcgatccacctgcctcagcctcccaaagtgctgcgattacaggtgtcagccaccgtgcctggcccctagcatttattgagtgcccatgccaggccaggcttcatcctcaaccctctagatgcacgttagtccatttgctgtttaccagggctctgctgaggtggagggggaggatggctccttttaatgatggggaggtgacaaagcttatataggacgaggcaagatctgaactctggtgctaaagctgatgcccctaaccacctccgtgagccaaggtgggaacctggtttcctgagaccctggctgagacccagactgtaggtcactctcttcaaagggatggactaagctggtggtcaagagaacagatgtcctggttcaagtcccaccttggccactcactggggaccttcaagaattcacttcacttcaagtcccagcccactagtataagccttcttcaccttaatttttttttttttttgagacaaagtctcactctgtcacccaggctggagtgcactggtgccatcttggctcactgcaacctccgcctcacaggttcaagcgatgcttgggcctcagcctcacgagtagctgggattacaggcacacgccaccatgcctggctaatttttgtatttttagtagagacggggtttcaccatgttgtccaggctggtcttgaactcctgacctcaagggatctgccctcctcaagctcccaaactgccgggattacaggtgtgagccatcacactcagcccccaattttttaaaaaataattttaatttaatttaatttaatttatttatttattgagatggagtctcactctgtcacccaggctggagtgcagtggcaagatctcggctcactgcaacctccgcctcccacgttcaaatgattctcctgcctcagcctcccgagtagctgagactacaggcatgcgccaccacacccagctaatttttgtactttttagtagagatggggtttcaccatgttggcaagggtggtctggatctcttgacctcatgatccacccacctctgtctcccaaagtgttgggattacaggtgtgagccaccgcactcagccaactatacttttgtgtgtgtgctatgaaccttggccatgtgagaatagtgctggctattttattttatgcataaaggcttgtaaatgcataacaaaatagcaagggcttcaaggttaccttttgtaataaaatagctatcaaaatattttttaaggctaggcacagtgtctcatgcctgtaatcccagcattttgggaggctgaagcaggcagattgcttgatgccaggagttcgagaccagcctggccaacatggtgaaaccccgtctctactaaaaatataaaaattagcctggcatgctggtgtgcatctgtagtcccagctactcagaaggctgagatgggagaatcgcttgaacccaggaggtggaggtttcagtgagccaagattgtgccacggtactccagcttgggcaacagagcaagactgtgtctcaaaaaaaaaaaaaaagttttaaaaatggcgatctaacaatgaatatacttctccattaacacactgagtaggccgggtgcggtggctcccgcctgtaatcccagcactttgggaggccgaggcgggcggatcatgaggtcaggaaatcaagaccatcctggccaacatggtgaaaccccatctctactaaaaatacaaacaattagccaggtgtggtggcaggcacctgtagtcccagctactcgggaggctgaggcaggagaatggcgtgaacccagggggtggagctttcagtgagccgagattgcgccactgcactccagcctgggcaacagcgagactgtctcaaacaaaacaaaacagaacaacaacaaaaaaacactgagtaacaaattctagctgtaggtttaatcacaagcaacattttaaagcaatgatgaatgcaaattaaatgttaaggtatctgcagctcttataatgcagtatgaaaatatctgatgtttataagtgacacaggtcatgttgataatattaagggttgataatactaatactaagggtttgttatctccctttaagatggaaggaaatgttaaaatttagttagtggctggtgaaaaataaagacatatttatttttattattattatttttttgagacttgctctgttgctcaggctggagtgcagtggtgtgatctcagctcactgtaacctccactttgtgggttcaagcgattctcctgcctcagcctcctgagtagctgggatcatgggcacccacaagcacgccaggctaattttttgtagttttagtagagatggggttttgccatgttggccagggtggtctcgaactcctaggctcaagtgatttgcctgcctctgcctcccaaagtgctgggattacaggtgtgagtcactgtgcctgacctctgtgtttgttttttaaagatggagtcttgctgttgcccaggctggggtgcagtggcatgatcatagctcactgcaacctccacctcctgggctcaaaatatcttcccacctcagcctcctgagtaactggcactacaggcacgagttaccatgcctggctaattaaaaaaaaattttttttttttttgtagggacaggggcttgctttgctgcccaggctggttgagaactcctagcttcaagcgatcctcctgccttggcctcctgaagtgctaggattacaggcatgagccactgtgctcagcctgatttcagttttctttctttctttcttttttttgagacagagtttcactcttgttgcccaggctggagtgcagtgatgtgatctcggctcaccacaacctctgcctcccaggttcaagcgattctcctgcctcagcctcccgagtagctgggattacaggcatgcgccaccacacccggctaattttgtatttttagtagagacagagtttctccatgttggtcaggctggtctcgaactcccgacctcaggtgatccgcccaccttggcctcccaaagtgctggaattacagccatgagacacctcgcccagcctgatttcagttttcttatctctaaaatggatgctaaagactcccagccatgatgactcccatcattttgaggaactggatacataagcagccatatggtaacactcacaggttgggtctccctgggactccttggcaaacacaagaatgcctaagtaggatctgtggccactggcaggatactgaagccacccttgaggttggggttcttggggccacgttgggagaccatcatccaggacccattgttcccccttgggcttctcccaagcccatagctgtagccccaaggtggtacttaccagaatcccaaaagccatgactttcagcacacattccagagagaagagggaggtgaagacgatgttgaacacccgcagggcattttcataagcaacagaagccccatagaactaggggaaagaagcaggagtagcaggggtcagcgagcaggggtgggaagtgggaagtggggaggcagcttcatggctgttctccaggcaacactccagccccaggcaaggtctgagcaacctcactggtaggaggcacagttcaggaaagccccgctctccgccggactaggctcttcttttcacatccaaaaaaacaaaaacctcccccaaccttttttttttttttttggtagacggggtcttcctattttgcccaggctgggcttgaactcacaatcctaccttagcctcctgatagtcgggactataggcatacgccattgtgcttggctgaattatactttttttttttttttttttttgaggagtctcactctgtcacccgggctggagtgcagtggcgcgatctcggctcactgcaagctccacctcctgggttcatgccattcccctgcctcagcctcccaagtagctgggactacaggtgcccaccaccatgcccagctaactttttgtatttttagtagagacagcgtttcaccgtgttagccaggatggtcttgatctcctaaccttgtgatcgccctcctcggcctcccaaagtgctgggattacaggcgtgagccaccgtccccggcttccttattttttttgagacggagtctcactctgttacccaggctggagtgcagtggtgtgatctcagctcactgcaacttccgccccctgggttcaagcgattctcatgcctcagcctctcacgcagctggtattataggcatgcgccaccacgcccagctaatttttgtatttttagtagagacgggatttcaccatgttggccagttggtcccgaacacctggcctcaagtgatccgcctgcctcgacctcccaaagtgctgggattacaggtgtgagccaccttgcccggccactattgatcgtttttgaagtgccgagaaggagctaaggtccttgcatgaactttctcattcaatcctctcacctcctctggagggggcaaatgtgctcttattatcattcccattttattgacagggaaactgagtccccagaaagtcactggttgcttgtacaaaggtaaatgaattaaatggaagagctgggcttgaatccacgctttggagtccaaagcacagggtgaaaggttttcagagtttttttttggaagccgctccttagccctggggattttagggtcctcacctaccccttctccctcatttctttctttttcttttctttttttttttgagatggagtcttgctcttgttgcccaggctagagtgcaattgcgctatctcggctcatggcaacctccgcctcccgggttcaagcaattctcctgcctcagcctcccgagtagctgggattacagatgcgcaccaccacgcctggctaattttgtatttttagtagagatgcggtttctccgtgttggtcaggctggtctcgaactcgtgacctcaggtgatccgcccgcctcggcctcccaaagttctgggattacaggcatgagccaccgcgcccagccccctcatttcattaatcaaacatttatagagagcttcttgttccgtctgagccagatccttgttggcctctaggaattcagggctgaggtcatcataaatgggtgggggacactgtcatgcaacctgacgcagatttttgtggcaggcgacataaagataggatgcctgctaagatgggcacctcaagcagtcttgggtggtcagggaaggctttctggaggaagaggtctgcaggtacagctgggaagaagaagctggccgggggagtggtgggaacagtgtgtcaggtagagggaacagcaggaacaaaatctcagaggtgatccagagtgtggtctgtctgggaaactgcagatggtttcattttatcagggtagaggcaggaacgaggtgggggttaagtagtgctgggggctggtgtggggcacttaccttcatcataagcacgatggtgttgagggcgatcatggccatgatcgtgtactcgaaaggcggagacaccacgaactgccacatgcggtactggaagctctgcttgttctgcggcatgtgtcgggtcagcggcttggcgctgatggcgaaatcaatgcaggccctctgcgggagagaggccagtggtgagagcggcagaggcaggaggaaggtggctgtacaccgggcaccctctgtctaactcgtcgcggttctcaagtgcttctgcttgagtctctgcctctcttgcccccagccaggattcctgggctctctcttccttctcaccattgctttcttatcccaacagctacagttgcttgagatgtcaccaactgccaaaacttgcactgacatttccccattattgcatggctaatacaaacatgggaagtgggtactatcaatggcctcactttgcagatcaccaaaatagaggcttagaaaggttaaaccacttgcctgaggtgacacagctaccgagtgtgccaaatcaaattgaagcctaatccttcttccccttcctccctccctcgctccctccctccttccttccttcctccctccttccttccctccctccctccttctctccctccctccttccctccctccctccttccctccctccttccctccctcctttccttccttcctccctccctccttcactttcctttttccttccttcccttcattccttccaccctttcccctttctcctttcctttctctcttcttccttctttccttcgctccctttctttcttcttcattccttcttccctatctccttccttccctccctcctttctttctctctctcatttccttccttccctccctccctccctccttcctttttttttttttttctttgacacgggcttgctttgtcacccaggctggagtgcagtgcaatcacagctcactgcagccttgacctcctggactcaagtgatcctcccgcttcagcctcctgagtagctgggactacaggcgtgcaccaccacacccagctaattaaaactttttttttttaatcatagagatggggtctcactatgttgctcaggctggtcttgaacttccgggctcaagcaatcctcctgccttggcctcctaaagtgttaagattacaggcgtgagccactgcgcccagcccattctttcttactgaatactttgctgcgtcttctccttctctttgagggagagagaaggaggaatagtggttattaagtcttaagggtcaagggagcagaggatatattctaggtcctctatttagcttggatgatgccagagaggcaaagagtcatgtctatactctctggtagacaggggactggattttctttccttttctttttttgagagagggtcttgctctgttgcccaggctgtagtgcagtggcataatgatagctcactgcagcctcgaactcccaagctcaagcatcctcccacctcagcctcccatgttactggggctaaaggtgtgcaccatcctgcctggctaatttttttgatttgtagtagagatggggtcttgctatgttggccaggctggtctcaaactcctgagctcaagtgatcctcctgcctcagcttcccaaaatgttgggattacaggtgtgagccaccacacctggcttggcttttcattcataaatattcaccacccttcgctaggggagattgtatttgcccactccactgatgtcagaatggatgtgtgacttgctttggctgatgaaatgtgagcagaagtgacatgtgtaatttttgagcacaagcctgaagaactgaacctcagtctgacatactctctttttcatctggagcatctcagagggaggctgctctgctgctctgccagcctgggaaccagaataaagatggcaagatccacaactgatgttgacatgcagtgtgagcaaaaaataagtccctttgtggatatttggcaatgaaatctggggttgcttgttactgcggcataacctagtctaaactgactgatacatacactatatgatgtgtttcctctggaaactccatgaagggctgccctgaagactggattcggttgggacaatgcttctgttccctcccccaggtacccctagaaaggggttcctgggtgttgtgtgtgttttaaagtttgtgtgtgtccccagtttttaaaggacagatggaattggaagtggcacctcatttttctccaggctgtattcctccatcatcttgtccccttgctcctggaaggtgatgatgatcaaggccacaaagatattgacaaagaagaaggggaacaccacaaagtagacgacgtagaaaatggacatctccatgcggtacccggggctggggccctggttctcaaaggtggcgtccaccgaatgcttgaggaccctgcaaggaatggggcagggagagggaaggggcaggaaggagagagacagggacccaaggggtgatgaggaaggtggagagagggtggaagtgagatggcagaacaggaacagagggaaatgaaaaagaaatttaagtagtcgctgttttttgaaaggctgacaacaatgtcagttatttcttaattttaattttaattttttgagatggagtttcgctctcgttgcccaggctggagtgcaacggcgtgatcttgggtcactacaacctccgcctcccgggttcaaatgattctcctgcctcagcctcccaagtagctgggattacagacatgcgccaccaagcctggctaatttttttgtatttttagtagagacggggtttcaccatgttggccaggctggtcttgaactcctgacctcaggtgatccacctgcctcggtctcccaaactgttgagattacaggtgtgagccaccacgcctggccaatgtcagtcatttctactgctgtgcatgaagggcttgctgtgtgctggaaacaatattcaacaattcatccccaccggctcagcaaccctcccagggaggttattactggctccactttgcacatgaggaacttgaggttcagcaatttaaagggacgtgctgaagaccacccacttataagtggccaagttgggatttaaagacaggttgtggcaatggagggagtagaggtgggtgtatgcatgtagagtgggtatttgagcacaggtggtgctgggtgctcaggaggtacaatggggatatatatgagagtgggtaagtgcacagcagctctgtacagtagtgcaggttgcacactgctcaaaggctctgtgtctaagcgataccttcacatgataggcatgatagatttgtgtattcatgatgacaattttttggcaggtggtccttcagtgccttgtttgaacaaaatcatttaagtctattgcgatgattttcagacagatggaaatgaagtctgttgagaaaggtgtttaaaaaaactttgctcaaaggtgccttgtgggttagcattattcccacatgtgtgagtactggatgtgtctgagagtgggtagtagggcatgttcaggttggcatatttgctgagagagggagggaggtgaggatgctgagggcacatgctggaatctaccaagcttccagcctggcatttccaagacctctgagagaaagaccattacttggacgaggtgagggagggaggcatttgttttgggtgcaaattaagggggtactgaaaatctcagtaatcaagataatcttttgctccaatattttaaaaaatcaaaattaatgcaaaaagtccatgatgaacaaatatcaatttcttcttctttttttttttcagggataggggtctccttctgttgtctaggctggagtacaatggcataatcacagctcactgcagccttgaactcttgggctcaagcgatcctcccacctcagcctcctgagtagctgggataacaggtatgagccaccacaagtggctcaaaattttaaataaagactaagtccatgattcagcctcacttttttttttttttgaaggcggggaggccatagtcttgctctgtcactcaggatgaagtgcagtggtgcaatctcggctcactgcaacctctgcctcctgggttcaagtgattctcgtgtctcagcctcctgagtagccgggaccacaggtgtgagccaccatgcctggcagcttttttttttttttttttttttttttttttgggatttttagtagaaatggagttttgccatgatggccaggctgatctcaaactcctggcctcaagtgatacatctgccttggcctcctaaagtgttgggattacaggcgtgagccaccatgcccggcctccaagacctttcttattgctaagctctcaggccctttatcctcctgctccccagggctcctcctggatagatttccagtcgggccacttactgtggccagccttctcccgtggacacggtgaagagggtcagcagagcccacagcacattgtcgtaatggaattcatacttcttccactcccggtctcgcgccttcacctcattcttctcgtagaggaggtatttgcctctgccacagagagtggggactgttagtaaatgggaaagaggggctgtcttgcacttgtctttggttatcagagacagggggagggaaaggaagagtggtccaccagcctagactgcttgggaagcagtgactccccatcctgccaccatgtgttcctgtgcttcataggggatgacgtgtgcatctactttgagataaatccatgggtgatggcacaaccttactcctggtgggagagctgacccagggtccagcaccctcttccaacgtgataacttctagtcctcagggtgagagcctcaggcttgctgggggtggggtggagggagtttaggaggaggcagagagacataggggacatttagaggttcatcaggctaagggaggttgctactccttttcaaggcaggaaacaagggttagttccagactcctatccagacatctggcatcctcctaatttcaataaatagccatcaagataacaacaggctaccatgtgttgcaaaatgccactttacactggtaacaatatcactatatatacacatacatatatatacacacacacatataatacatatgtgtgtgtgcgtgtacatatatatatatacatatatatatatatatatttttgttgttgttgtttgtttgtttgtttgtttgagatggagtctggctctgttgcccagactggagtacagtggcccaatctgggctcactgcaagctccgcctcccgggttcacgccattctcctgtctcagcctcccaagtagctgggactacaggcgtctgccaccatgcccagctaggtttttgtatttttagtagagacagggtttcaccgtgttagccaggatggtctcgatctcctgacctcatgatccgcccgcctcggcctcctaaagtgctgagattataagcatgagccactgcgcccggcctatatgtatatatttttgagaggcagggtctcactctgtcacgcaggctggagtgcagtggtaccatcatagtgcattgcagccttgaactcctgtgtttaaacaatcctcccgcctcagcctcccgggtagctgggactacaggtgtgtgctaccatgccccgctaacttttaaaatttattttgtaggatgggctctcattatgttgcccaacctggtctccaactcctggcctcaagtgatcctcccacctcagcctcccaaagtgttggaattacaggtgtgagccactgcacctggcctcttacctaacttatttggtaatgaaacctgatctgattggacatgaagctctttatacttgttatttaccccatttgatgtaaatagttacacattttatggcagaaatattgtgtttgattatagggctgccttagacccagctgagggtgtcatgtcccacatgggaatctcaaaatattctcaactttgaaacacatctgcctgtaacgatttcaagtaaggaactgtggatgtgtattaatatccctcacatgacaaaggcggtggctgaaaggtcaatcaatttgcttatgactcattctgtggctctgggtggtgactcaaattctaaaaccggttttctttctacccaagatccaagctggttgcaactgagtcacttccaaggctcatcacttctccagtctctgagcccaagtggccaatgcctctagccacttcccccctgcccacctgctggttccaatgggaatgtgctggaaagtggagacccaccgacaatctttctcaaactctttggactcgtcagtgcagtggaagaatttccccttgaagagctgcacagccaccacggcgaagatgaacatgaatagcatgtagacgatgaggatgttgaagacgtttttaagtgagttcaccacacagtcaaacacagcctgtggggtggagttgacagagagcatgaggggctggggacctgcccaaccttctgcctccagtggcccatcataccaaaatactgccatgatcattcccattttacaggcaaggtcataagtcaagtcactagggtaaggtccccccagctttcagaaataagcgttggaggagttggactcaatcctggcattctatggatctaaaactcccagatgggataccagagatgcttttaagtgatacaggagcccaacacagaaaaacaaggtaacaaagttacttcctttccaactctctcaatccttttgagtgaaggagaaatttttacttagttgctaccatgttaacacctaccattgacattttccctctttaaccaagaaagagcagttgtcaatgcacaaagccttaggcaggcagccatatttggttagatttccataacagtatctgttttctgtctttaatttttagtagagacagagtctaactatgttgcccaggctggtctcattctcctgggctcaagcaacactcctgccttggtctttcaaaatgcagggattacgggtgtgacttgatttaaagaaacatattacataagagataatactggggacccccaggtgaagcatagagtgaaagtgggtgctctaatgactggattttatttcccttaatatatatatatgtttttgaatgacaggcttttgggaaatgctggttcatgctattttggaatgggagatactagagcctagaataggtagatgaaaagtcaaaattttatggaacaagaaatctagttcctgcttcccagatcacggttatacccttttaaatccatatgatgccttcatgcgaattaggaaaaaggatcttaaccccaagacacttcatctaaagaaaaactgccataatacacagattattttaggtcagctcactttactgccatctgctgggaagttgtaataatacaaatatccatacacgatggctaggatgttatcagcacctcctttaatgtgttgtccttgagcagtgtacaacctgctcagctgtacatgataaccctgacagtcccccccaccgcaccccaccatctcccaatctcaccttgagctttggcagccgcttgatggttttaagaggtcgtagcacccggaggactcggagggatttaatcgtgttgatgtcttttcctttgctattgccactgtggaggaatgtttaggtgggaagaagggaagagaggaagcagaggtcaggttgggtagggggcagcccacagctccatgggaccctaccctcccaggcctagaagtctggggtgagcttggcacagccctgcccttcctggtgaagagtggtccatttcacctgttaagcttgggctcgggagccagtaagtacgtggctttttgtggttctggtcccagggttggttgagggccctttgccatctggctgggcctgagcagctgtattgggtgtccctgagacccagcacaagggggttggctgattccccacccccatttctgcacagcttttcttttttcttttttgagacagggtctggctctgtcaccaaggctggagtgcagtggcacgatctcggctcactgcaacctccgcctcctgggctaaagccatcctcccacctcagcctcccaagtagctgggactacaggcacacgccactgcgcctggctaattgttttgtctttttgtagagatgaggtttcaccatgttgcccaggctggtttcaaactcctgagctcaagcaatctgccctcctcaccctctcaaagtgctgggattacaggtgtgagccactacacctggtcacagctattttcaaaaaagcccttggtctaggagtttagtggtcccctatgtattcttttttttttttgagatggagtttcactcttgttgcccaggctggagtgcaatggtatgatcttggctcactgcaacctccacctcccaggttcaagtgattctcttgcctcagcctctccaagtagctgggactacaggtgcgtgccaccatgcccagctaacttttgtatttttagtagagatggggcttcaccatgttggccaggctggtcttgaactcctgacctcaggtgatccacccaccttggcctcccaaagtgttgggattacaggtgtgagccactgcgcctggccccctgtgtattctttttaaaggtggtatcagtgggctcttaaaaaaatgggattttctcccccttccaatgggattctggaagatacttaaagtggcccttataccaaatctcccctcccccaccatattccctgagtctgaaggagggaaaataaccgggtgccgctgttttcagatgctgatgtggctgctgccatggtctctgctgcattgctccaagggtctctgagcccatctttgccagagaggactgcacagaagttcagtccaaggtctgttggaactgagcttagcaatgcagaccccagagatgccatgacacccttggccaaccatgactcaggccccccaagaggagggtattgagtgggaccatgaatagcttgtggttcatggcactcatgacccatccagttgtccacaccagaaacctgagagtcatggtcaactgcctgccctctatccccatccccatccccagtgggtcaccttccttaacatcccgccatccattcctgggtgccatcccccctcacccgtctcccaacttgctcctcattccctgccttttcttccatgttttatgcacacagtggctaaagccaatgaccttgtcactctttctcttgctcagaattcttctggagcacgtgaattctcagaagagcaagtgcaaacttctgggcatggcattcaatgctcttgaaaatctagtccaacttaccttcacctttgcattcccatttatggctacatatctcaagccccagccacattcttttgcctctgtctgcttatgcatatactgttcccgctgctagaaatgcccttcctccacttctccagtcacagaactacccggtcctcaaagcccaaattacctgttgctccctccgacagcatttcctgactgcctacctctggctcctgccagctcctatgtgctatttcggagttaatctttgtttgtttcttcggtctctggttttagacagaaaactcttcaaaggcttacagtgtaatctactcttctctgtgttcattttccctttaatctttttttttttttttgagatggagtcttgctctattgcccaggctggagtgcagtggcatgatcttggcttactgcaacctctgcctcctgggttcaagtgattctcccacctcagcctcccgaatagctgggactacaggcatgagtcaccacacctggctaatttttgtattttcagtagagacagggtttcaccgtgttggccaggctggtctcgaactcccgacctcaagtaatccactggccttgactcccaaagtgctgggattacaggcatgagccaccgcacctggccatttcccctttaatcttgattcttgtcctagcccctagcctgcgcctggcgtgtggtctcaggacacgtgaatgcctccggttggagtatttgggtggggaggtcacctagaaaacatctccctacagtgacctcccaggtcatgagcagagctgccccagagacccccatcacgatgggtctcagtatccagtgcaaaaacatcattcttcacaccatttgctttttaaaggactccatttttttcatttttcagggaacaaagacgataattgtattttagcctgctaggcagagatatactccaggattcagaactctgaacctttttttttctttttaaaactaacatcatcattatcatctcaaggctgtgcccccaagtgtgagacacacgttggacagtcactgagataattttaggcagaacaggggcacagattaaataattggatctcagaggggcataatcatttctttttctttctttcttttttattatactttaagtttcttttccacgtatctttcagacgctctgcttttgcgagaaaggaagcctcaggtagatgctaataggcctttaacacctccctaacacttagtaattttccttttaacaaagagcccagcttgaaggcaacaacattgtctggtttctgttagatttactttttttttttttttttgagatggcatttctctcttgttacccaggctggagtgaatggcgtgatctcagctcacagcagtctctgcctcccgggttcaagaaattcttttgcctcagcctcccgagtagctgggattacaggcatgtgccatcacgtccggctaattttgtatttttagtagagacggggtttctccatgttggtcaggctggtctcgaactcccgacctcaagtgatccacctgcctcggcctcccaaagtgctgggattataggtgtgagccaccatgtctggcctacatttacttttgcagttgcagatttatcttaggttagcaatgctggttgtaagtggataatatagtttcctttttttttatttaaattaaagagatggaatctcaggggggagtgcagtggcacgatcatagctcaccgcagcctccaactcctgggctcaagtgatccttcagtctcagcctcccaaatggctgggactgcaggcatgcaccactgcacctggctaaagtttccttttgaaattgaactttagaatacatgttgatagaaaaaaagtcaaggaactgtacatccaggttgcacatggaactggctaaaatcttgatgtcccaaacaagtgacaattgggagcatgtctccatgggcattctgcatctcctcatctgaaaacgattccatggccattttatttttttattgttcaatttattttatatatttttttgagacagagtctcactctgtcacccagggtggagtgcagtggtgcaatctcagctcactgcaacctccacctcccaggtttaagtgattctcctgcctcagcttcctatgtagctgggattacaggtgtgcaccaccaagcccagataattttttgcatttttagtagagatggggtttcaccatgttgaccaggctggtctgaaactcctgacctcaagtgatctacccgcctcggcctcccaaaatgctgggattagaggcgtgagccaccgtgtctggcccactttcattgcttctgataactgctccacccagcttgcctattgaaactgaacctctgccccttctgttctctgcaagaactggtggggcatgggcggaggcattggcaagaccctttgggatgcctccttcgcagggagtgagttctggtcatttgaagcgacaggacagcggcagcaaggacacaaggccacagaaacaggcccagaactaacgaggctgcaccaggggacagatcacgagagacagaatatgagagagagagagagagaaagagagagagagagaaagatagagagagactttaccgtgtactgctcctggtgatgtggcatcggagggagagacagatcgtaagtggcctcagaaaaaagaacacagaacacgcacgtacacacacgcacccctgagcacccccgagtcccgcccgggcagcagttgggggagcctcaggctcatggcgctggccgatgtccatccttccatctggaagccgcccccacctccattcagtcccccgcccttggcaggcacctggcactgcccaagaaagcactaagaaagccaaatttccaggtagcaggacagctgcaaagctgtcagttaccaaaggtgaattcaccacggaaagtcactgccaagagccggagaaacccctcttctccaggcgttgtggagctgcaaggttttagaatgtctaaaaggttgtgagctttgaagttgaggggacctgggtttgaatcctgactctgcctctcgttatcctcatctgcaaaacaggcccagactgggtgccgtggctcacagctataatcccagcaccttgggaggacgagttgggaagattgcttgaggccagaagttcgagaccagcctggacaacatagggagaccctgtctctctccttctctcctttttttttgaggcagggtctccctctgttgcccaggctgcagtgcagtagcgggatcttggctcactgtagcctcaacctccagggctcaggtgattctcccaccttagcctcccaagtagctggaaatacaggcaaatttttccattttttgtagagacgggggtctcattatgttgctcaggctggtctcaaactcctgggctcaagtgatcctcctgcctaggcctcccagagcgctgggattacaagtgtgagccactgcatcctgggcaagactctgtctcttaaaacaaacaaccaaccaactcaggtctgtggaattctgatgtttgattaacaaaagctatggccttggctttgctctttatgaaggagggggtcagcaaagagttctgacttgggatggaattagaagcaactctgaagccctctgagcaaatgcgggcctggggaaagctatcagcacctagcagctggtcctctcgtgattcattggaatcaggcttggggctcattaggcgccttcaacaatgactggagatccaggttagaaagacttgaccgccatcagaatggcggaaaccctgtcgccaagcggactctatggaattttccatccacgacccctctggaagttagtgatttttttttttttttttgaaacggagtctcgctctgtcgcccaggctggagtgcagtggcaagatctcggctcactgcaagctccgcctcccaggttcacgccattctccttcctcagcctcccgagtgctgggactacaggcgcccaccaccacgcccagctaattttttttgtatttttagtagagatggggtttcaccgtgttagccaggatggtctccatctcttgacctcgtgatccgcccaccttggcctcccaaagtgctaggattacaggtgtgagccaccgcgcccggctgtgatattttttaaaacacagaatggtttaaatgtctacaaatattccaagtggattctcctccacaccccctcatctccttttcctgtagtctgacttggggttctcaaattcagtgtatctaggaattattgcatacgtagaatcatatagattctactttttttttttttttttttttttttgatggattctcactctgttgccaggctgcctcagccttccaaagtgctgggattacaggcgtaagccaccgcacccggctttattttatatttttagagacgtggtcttgctctgtcgcccaggctggagtgcagtagcacaatcatagcttaccgcagccttgaactccctggctcaagtgattctcccacctcagcctcccaagtagctgggactacaggtgagagacaccacacccagcttctttacggatgattgagggagttttcaatgacagtgatttttgcctaatctgctgactttaggtttaatatgggagtcttctggacatcactgcatttgcctatgggaagacagcaccattatgaccattttccagatgaggaagctgaggcctagagaaaaagagtgacctgcccaagggcaggcacacagctgggaagacagactaagattcaaacccaggtgtgggtatctcgcactctaatcttctttccatttcatcatacacaagaaaaataatgccttcaggggtgggggctgttttgaagatgaggatcaagagatagcagcctgagggctccatctttggcttcctgacagtttggctcctgggtatgcaggagcagcttgatcaaggcgctctgccagttgcggtcctgcctttgggggaagaacagccgcgccagatggactcttggcggtgagggcaggatcatgatctgccagctgctgagaaatgtcagttggccgccctgatgcatgggcacagagcgtgataccacgtgtgatggctcatgaaatggggtgtttatggtagacgcatggatacaagggacacagtcagtgaattgagcaggacacacacacacagatatttgggtgaggtgcaggaggggtggacatcttcagaagagcttcaatacatcccttggtgggaccacagggatagttttctcccatatcggagacgaggccacaatcacagcactgggggaagaatccttgctttgaccccaacaggccagaatggcaaggttcctttcaacaaggaagggaataaccttatgctcccttcccctattcccttcccctggatctcgcagccctgccaggcctcaaagaacccaggctggccaggctgctgagcatcattctgctcactgtgagcctccgtattcagggctgggagatgggtagcatctgacagctgaacccaacctcagtgatcttgtcggacttacttccctccacagtccctctgggccgcagtttcctcatctagatgggaaaaactgaggcacagagaggctaaaggacttgcacatctagagagaaatcaaacagacctggagggacaatttcttaaaacaataaggtcaatctaatacttgtggggctctcagccttgtctatgaggggatatgcacagaggacagacaaagcaagttaaaagaccagaaaggaaataagcagaggaccctggggtggggggtggggggcgggtggagagttcagcgctcaggctgagaacctcagagcatccatgctccttccaatgtgccaactatccgataacaaggaaagacaataagcaaagtcctcatagggtgagagaccttctcaggcaaaagaggccagaaacctgtaacggggagaagattccaaaactttttagggaaaaaagcagtagctcctattctggttttctagcagtttggctcttaggtgtgcaggaatggcttgatcaaggcacctggccagctgtgctgggcctgcagccctgccctgggggaggaacagcagtaccagatggactcttgacagtggggtggggagggtgtggtaggcgtgaggtttgagggtctcctctctcatcccttcggccatgatataaagatgctccctgttggactcatgtccgtcggctcttccaaaaccctgggagagtcccaggcacttgccaggatcctactggcaaaatctcacacctcccagttcctgcatgatctacaagcctgccagggttgacaggatggcctgaaatccctatccagatccttttcttgcataagaattaaaacaacaacattcaaaatggattttcaagagtgaagggtggctttatgcctgtaccaatttcatgagaacaatgtaaaagcttgactctgcaaacaggctgccaaattcctgtgagttgtaggccaatttgaatgcccttgtataacttgatatttaaaaagaaaactcagaaattaaaaaaaaagtcaactccccaaaagaatcattctgctgttttttttttttttttttttttttgagatggagtcttgctccgtcacccaggctggagtgcagtggcacaatcttggctcactgcaaccttcacctcctgggttcaagcaattctcctgcctcaccctcccgagtagctgggactacaggccctccccaccacacccagctagtttttgtatttttagtagagatggggtttcaccatgttggccatgctggtcttggacccctgacctcaagtgatccacctgcctcggcctccccaagtgctgggattacaggtgtgagccatcgcacccagctcattctgctaattgatctctggtggaaaagaatttttggttcgcttttgcagattagctttgtttaaaagaggaggctaattttacctccagagaacctagaaacagcatgttgtaaacgatggcccataatggcaaaagctcaacaattgaaaggcttgcttctgggtcctttgtaggtcattcccctccctaaattgtgatggtcaactcggaggatggaggtgggacagtcacctcctcagcatttttttttttttttgagacagagtcttgctctgttgcccaggctggagtgcagtggtgcaatcttggctcactgcaacctccacttcccaggttcaagcaattcttctgcctcagcctcccgagtagctgagattacaggcgcctgctatcacgcttggctaatatttgtatttttagtagagacagggttttaccatgttgcctggggtttcaccatgttgcccaggctggtcttgaactcctgaccccaggtgatccatctgccttggcctccgaaagagctaggattacaggcatgagccactgtgcccggccctcctcagcattacagtatgtcagctacaacagaggtctgagaggaaagtgacattggagacctgaacagcttgggcttggtaccatttatctgtgccacactcagtggtggtcactgggaggattcacaggataaaacccattcccctgggcacaggtggccaaggtaagcattgtgtgtggacaggtggatatgagtgacatattcaccccactgcctgccctagtgccctgagctacctgccacctcttgagccctaggaatcttggaggctgctgagcagaccttgccccagaggaaaggggcgggggtccctgcctgagcatgtcctcctgtgtcctgggatctgcctttgtctgaataccattcctcatcagaatgcagggtaggggggccaagtccctgttgccagaccgatgacagagggtcagctttctccaagctacacggtccaggggaggcccacatcacccaaggacataggtcatcaacagtgcagggagtgagagagaaagagagggagagagagagagaaagaggaaaataaaaagatagaaactgagagggggtaaaaggagaaagacgaacagaaagagacagagagagggaagaagagagagggaagagaggggaaaggaggaagagaaagagggagaaagaaaaggaggggagagggagggaaggggctgaaaggcagagaggggtggagaaacccgtaggttatttccataggagaaggattcattccaggctgagggtggtaaaacattctggcttttcaggatttaaattttctcatagcatgatgtctacctgacaacttgaaggacctgcttaaataggtgatagagggggagaaaagtatattttattataatacattcctttttttatttttgagacaaaatcttgctttctcacccaggctggagtgcagtggcatgatctcggctcactgcagtctccatctcctgggtccaagcaattctcctgccttacccacctgagtagctgggattacaggcatccgccaccatgcctggctaatttttgtattttttagtagagacagggttttgtcatgtcggccaggctggtctcgaactgctgacctcaggtgatccccctcccttggcctcccaaaatgctagggttacaggcgtgagccactgtgcccagcctattataatacattcttatatatgctgtttattagctaaaaaaatcattttttgtgtgtgtgtgggggtgcggcgggaacagtgctaacttgatagggaatgaattgtatctcgtttttattttacatttctctgaattccaagggttgatttacctccatttttactagttgccagcattctatcagatttctgtttatgtcctttgcccatttatccattgagaagtagtgtttcttattgatttgtaactgcttttcatattttaaagacatggactccttgtcttattcgtcacaatctttgtcccctaatttgatgtgcattgtattttgtttaattaattatttatttatttactttttaacctacagaacagcttgctaaacctgttttttttgtactcatcactattaaaattattcagtaaccatataaagcataatattctaaatagcaaattcattgatttttaattttttaaactttttatttttttgagacaagttcttcctgtgttccccagactggggtgcagtggtgcgatttcggctcactgcagccttgaacctcctgggctcaagcaattctcccacctcagcctcccgtgtagctgctagtgcaggcatactaccatgcctggctaattgtttttttttttttttagagatggggtctccctatgttacccaggctggtcttggcctcctgggctcaagcaatctgcctgtctcagcctcccaaagtgctgggattgcaggtgtaagccaccgtgcattgctctagtagtcaaatagacactgaaaagctttgaggagagggaaggatgtggggagggagaggagaagagaaaaagaaaagagtaaacgaacaaaaagagaggagaaagaggaggaaggagtgaaagagaaagagaaagaagtataatcagcctcccaaccttcatgatacatctccagctctgaggcatccaaaaactctggagattttttgttctaacacaacttgacctcattgtgttcccagagaagaatctaagtgtggcctacttaacagcccttctactggaaatgggccactattttggccctcctgacaaaccaagtcctcattgtttggtgagggagaccattcaagggcccctccagattggctcaggagggagcctagaggcagaggcacaggaggaagcccctgattctctcacgatgggagtgaatgtgtcaagatcctttcaaaacctgtcagggaatcattcaccatgatgggcacagccagggtccccaagatttgtttcttgattaaagactgattagatatttttcatcccgctccaaatgtctacaacttcaggaatgtactgctaagtctgctatcagggccctaagggctaatggccactcacctgttgggtaccatcttgaaatagtcacccagaacttgggggccattttgaaatggttgccctagaacttgggtgccattttggaatggttacccagaactagggtgccaccttgagatggctgcccagaacttgggggtcaccttcgagtagccatccaagacttggggaccgtcttggaatggctacccagaacttgaaggccaccttggaactcagggaccatgtaagaatggccaccaagaatccagaggccatcttagcatggtagcccagaaatcagaggccatcttggaatagccacccagaacttggatgccaccttggaatggttgcccagaacttgggggccaccctggaactcaggggccatcttgcaatggctgcctagaacttggggccatcttggaatagccacccagagcttggggaccatcctggaatggctacccagaacttgaaggtcaccttggaactcagggaccatctaagaatgaccaccccaaattcagaggccatcttggaatgatagctcagaactcaggggccatcttggaatggccacccagaacttggatgccatcttgggatgactactaagagcttgggtgccatcctgaaatggctgcctacaactggggcgccatcttggagctgcaggatgacacatggcctttcagagggcagagaatcctaggactgccaggagaagtgaaagacacacaaagggagtcaccaggtctacaactacggggccttcaggcatagggagggggtcagaattctcatgcacattcgtttcctgattgtctctttagggactttccaaagagacagcggtttgggcggcgcttgtggagtagtagggggatgagatgttccggcgaggctagtctacaggaagctgcacagcaaggggccagtgatgtggctgaggcccgttgctgtgtgaggaggtagaaggttggcaggagggggggtcccttctccttcttcctccatggacatcatgcaaaaagccatcgaagctcttcctggtggcatgctgatatctcccacgtccccggagcccacacaccccatccctagaccctgagaacatgtcctgtaatccgatgtgtggcccaggctgggggttgggggaaaagaggcaagaggaacccttgcgaggagacttacgtgaaggcaaaggctaccagggccccactgaccactatgaagtcgagaatattccagaggtcacggaagtaggcaccctgatgcaggacgagccccaggtcaatcatctgtgggggagaagagagggtgctcagaacccccacctgatccccaccctggggtgctgccacccactctctagcctctcggggagaggcagggaagccaatgaggccacctcatcttgcagggatgggcagtggccagaggactccagggaggagtggggagcccctgccccatgaggcggcccccctttgcctgatggaagccagctctggcttgccggctcttagatccaaactttgggatcctctttgatgcctctttgtcccaaatccctcattggtggctctatcagcaaaactcactggctctatttccagaaccttccaagaatctgtccacttctcacctcttctttggtcaccagcctgatcctgtccccgtcatcgcccatggggaccagtgtgatcacctgctcacaggtcctctggcttcccacagatgccaaagggcacctgtgaacacctggatcaagtccctcctctgctcagaacactctatggccctcacctcactcaaagtaagagccgaagagccctctctgtgatccccggcacaaggtgccccctcacctccccactcatctctctgtccttcgtttccccactgttctctcactccgcccagccacaccagcttccttgctgctcttcaaacacaccaggcatttctaatcctctgggagactcatcctctcaaggggggcattcttggaggctcaggatctcctggaatcccagctcttttttttttttttttttttgacagagtctcgctgtgtcacccaggctggaatgcagtggcaagatctcggctcactgcagcctccacatcggctcattgcagcctagggttcaagtgattctcctgcctcagcctcccgagtagctgggattacagacatgtgccaccatgcccggctaatttttgtatttttagtagagatggggtttcaccatgttggccaggctggcctcaacctcctgatctcaagtgatctgcctgcctcagcctcccaaagtgctgggattacaggcatgatccactgtgcccagccctgcacttgcttaaaaaaaaaaattaccgtgtgttctcacttataatctgcactcaccttgatcaccatctcaaaggtaaagacgcctgtaaaaacgtagtcaaagtatcgcagcacctgtaagggataaaagcaagagagcagtggatcactggcctgttccagcagagccccggtaaaactaacgatcgcctactggggagcagagtttctacccagaagaggaaacacagctgctatatacagttgcgcagggcgtgcactgcacaagggcccctcccatctcttttcatactgcagatttgtatgttgtgaatgaaattgtccagcagatggcagcaaatcctaacaaaaaaatcactgtactaggccagttcgctaacccacgggaagggtaccttttaaaatttgccccaagccctgtagtggattagaagcggccccagagaagttcagggctgactgtatccttcttggtgatggatctaatcccccagtacccttgctttcctgggcatcctgggcgagaaatagttgctacgtggtttttttaaacactggggccaacttcctgccacggcatctcttcctgcttcaaggccaggcccctgccagggtaggttgatttttcctgtgcccctccccaggcctgatgtttctgcctggacgagcaatgtcctctggcccagcccctgtccaggacacaccatagcacacctctggtgtcacccaggcctgaagatgagggtgcgccggcacagtgtctggctggtgctagacatggggtggacaccggctgggcacggtggctcgagcctgtaatcccagcactttgggaggctgaggcaggcagatcacttgaggtcaggagttcgagaccagcctaaccaaatggcaaaaccccgtgtctactaaaaatataaaaaattagctgggcatggtggcgtgtgcctgtaattccagctacttgggaggccaaggcgtgacagtcacttgaacgtgggaggcggaggttgcagtgagccgagatcgtgccactgcactccagcctgggagacagagactgtctaaaaaaaaaaaaaaaaaaaaaatcagatccacccagaagctgcaagggctgagcattactgaacatggccaccagagggcgctgtgaacaccaaagaagtcaggcacatccttcccctgcttacaatcctccgtggctcccacctcattcagggataaaagtcaaagtcctccccgaggccctcaagcccctgcacgatctgaccattcagctccctgccctcacttcctctcattctctcccttgctcacttccttttgttccccaagatgcttccacctcagggcctttgcacaggctgttctgtctctctggaatgctttcccccacatcccatttgattccgtctttctcctcctttatgacttagctcaaataacactttcccagtgaggactcccctgaccggctgtttaaattccatctcctggtgcttgagatcctctttacgaagtctctccttccctctgcccaccacacccccggccacttatcactccctgaacatttgttgtagttactgataatctcattgtccatctcccccacccaaatgtcagccccacaaggacagggatgtctgtctgtcaccatggcgtctccagcttataatacagggtcaggaatacagtaggtgctcaagaaatgtttgttgaatgaatgcatcaacagttggggctgtactgggtcctggaggagctgggctctgtgatctgtgtggttataacttatattcctgttatatgtggtgcttgaagaggaatcagagaccagagtgcctggggtcagggtgaggtgacttcctggagggaggggctggtgcaaggggattggcttgaaagacctgggtgggcagaggggatggtggtgggagagtatttcaggtgcacgaggcagtgggcacagcctggtcaaaggcctggtggtttgtgggctctgggagtgcagggaccatctcataccctgtcaatcctccctggctcgctcagtacctggcacatagtagttgcttatcaaatacttactaaaggaatgaatggaaggaaagaaggaagagagggagctgggaaagggcaggccgtgggggtcaggtgaatctaattctggagctcttaataagctgtgcaagaggaaatcaaaagaccaataaattaggttcaagtattcctaatacttagatctttttcatctatttgaaaatgttatttcctgtggctcagtctaatccaaaaaagtgcttgatctcattcattacagggaaatgccaagcacaaccccaataagatctcactccacacccagcagatcggccaaatgaaacagtcgacagtaccaagtgttgacaaggatgtggaagaacaggagttcccatgagctactggtgcaagggccactgcgttcatttattttttaatttttttttgagatggtgtctcactctgtcacccaggctggagtgcagtggcacaatcttggctcactggaacctctgcctcccgggttcaagcaattcttctgcctcagcctccaagtgtctgggattacaggcgcatgctaccacgcccggctaatttttgtatttttagtagagaccaggttttaccatattggccagtctggtctcgaactcctgacctcacgtgatctacccaccttggcctcccaaagtgctgggattacaggtgcgagcccggcccactgtgcccggcccactgtgtttatttttatttatttatatatattttggagacagggtctcgctctgtcgccaaggctagagtgcagtgacgccatcttggctcactgcaacctccacctcctgggttcaagtgattcttgtgcttcagcctcccgagtagctgggattacagttgtgtgttaccacgcccagataatttttgtatttttggtagagacggggtttcaccatgttggccaggctggtctcaaactcctgacctcaggtgatccacccgccttggcctcccaaagggtcactgtgtttattgtccaataaacattcaagctgcatttactgaggccaaccacttgcaaattatatgctctagaaacttcgcttttggtttataccctggaggaattcttatttattgagacagggtctcgctctgtcacccaggttggagtgcagtggtatgaacatggatcactacagccttgaccttccagacccaagtgatcctcccacctcagcctcccaagtggctgggaccacaggtgtgcaccaccacgctcggttaattaaaaaaaaaaaaattttttttttttttggtagaggtgggggtctcactatgttgcccaagctggtcttgaactcctggcctcaagcattgctcccaccttggcctctcgaagtgctgggattataggcgtgagccactgcatctggcctcctggagaaattactgtccaggtgactcaggaaacatgttgaggggcgtggcatggggacagtattcacacttagaaacaacccaaacatctgtcaacaggggatggataacacatcccatgccacacagtaaatctcaaaacagcatcataaagaatgctcattgaccgggcgtggtggctcacgcctgtaatcccagcactttgggaggccaaggcgggcggatcacttgaggtcaggagtttgagaccagtctggctgatagtgtgaaaccccgtctctactaaaaatacaaaaattagccgggtgtggtggcgcctgcctgtagtcccagctactctggaggctgaggcaggagaatcgcttaaacccgggaggcggaggttgcagtgagccaagattgcaccactgcactccagcctgggtgacagagcaagactccatctcaaaaaaaaaaaaaaaaaaaagaatgcccatcaatcctgcaaaagcaacatgtactcatttaatgcgaagcatagaagtgtctcatttattgaatgttacagaagagcaaacataaattcagtttttaagaattggccagtgttggccaattacaggcatgtaagaattggaattacatgcctgtaattccagagctctgggaatctgaggagggaggattgcttgaggtcaagagttcgagaccagcctggcaacatagcgaggcccgtttctacaagcatttaaaaattagctgggtgtggtggtgcatgcctgtggtcctagctacctggggggctgaggtgggaggatcacttgagcccgggacgttgaggctgcagtgagccatgatcacgttactgcaccccaacctgggcgacagagagagacattgtctcttaaaaaaaaaaaaaaaaaaagcctgtgcaggtgggaaaaagagagaagccaaaaacgctcattccagaagctggggtcgtggttaccggtaaggcagggtttctcaagctgggctctgtggacatttgggtctggatcatcctctagagtgggggctgtcctgggcatcggcgggtgctgagcaacatccctggcctccacccaccagatgccaggagcacctcccccctcctgtcgtgacaaccaaaaatgtctccagacagtgtccccagcagctctagagggaaagaaggcggtgggggtgggggatcgaggaggcacatgccgcgtggggcgtttttgttctatttcttgccctggatggtggttacgtggtgtgaacgttatggggccacagtgttcttgtagagaagtttcgactgcgagatggacgagggagggggccggggagctgaacgctctttgcaaacagtccctggggcctggtctgagcactgcctagattcccttcagccctgggagctgccgtgccccctggatcatccatgcctgtgccctccctgccgaaggcaacgccttcttcagcatcctcgcgtcagcagggggtttgtggacccctccagggacacctcctccccacgcctggctcctggaggcccctgggggaaaccaggctgcgggaagcaactaagcggactgtgaggaggctgagcactggctctagcttcctccaggagctgcgttctaattatttccttccatctcccccatcaggtccccaggggggcctgccaggcctgggaaggaagggaaagtgcatggtaagctgtgggcgggcttgagggatggggctcgccagctttgcctgggtcctaacctacttagccagggcagcagagccttggaccagcagaaaacacacttttttggctctgggttgggagggaagggttgggggagggagctggggagggaaacaggagccaccagtccaccctctaccaggccctggggtcaagcctctgcccgcagcccatgactgaggcacgcccttgcctgttggtgcctcggtttccccatctcaaccacaagcatgcactcattcctgcttgtcaggactcaaaggggctatgcacacccatccgtagcatacagtaggtgattagtaaatgcagacagttgggggaagcagtgggagctttgggggatgcagagttggaattctgctgtgtgaccctggacaggccacttaccactctctcattcccctgagcctcagttttcccatctgtcaaatggggatgcctgggcggggggttgggggggcgcattgtgaggattaaatgagatactgcatgctgagtttcttcctgggacacagcaagtgctcaattaacaggggttgtcaacagacccaccatccgcaaaggggcttgctttcataaaaaccaaaagcttaggctgtgtttctgagccaaatagttgtttctttcaaagcttcgtgtacaaagggaaatgtctactgcggaggggaccacctctgagcaccgcccctgccccagtaacccccctattccatgtagagaatgtgcaacatccatatcctgctagtctcacgcctccattagagaatccagcaattttcagccccagtcactctgggccacctccaccccaccaggctcacagagaaactgcctcaaggaatgtcttgctcccaagagcatccccaaggaatcagagcttcccctctcaaccagcagccataagggctatgcctaggggtgaccccaacatcccaccctacctatgagcattttggatgcaggagaaagtggcctgaggcagagcagccaggctaggaaggggtgtgctctgtgggactcacgttgttccgaggtgcgttgggctgcacagggtcctcggcggccagggcgatgctgctcatggcaatgaccatgaggatgcacatctcaaagtagcgcaggttcaggatgtaatggcacaggcggcgaaggctgttggagacagatgggcgtgcagaggtccactcagaccacaggctcacaaacccttttcttccataatctcatgttacctaccactactgagatctccaacccccaaggcctcctacacaacaaactattaaactcctccaggtgggggccctctctgggtcctggaaccccaagaaggcagaggggacctcggtgagagaagacattcacatgccctgtttagcaaagttcctatcactcccaaacgaccctcttgaagtatcttgatccccaagctaggttgaagaaatacggtccttaattctgtaggagataaaaaggcttttcgatattaaatgtcccagggccaaacaatattgtgaatctatgggttaagtagatttctttctttctttttaaaaattagctgtgtgaccttgggcaagttacttgtcccctctgtgccttggtgccctcatctgtaaaatagccgtaatactagtgcttacttcacaaaatcatgagacccaagacttaatttatgcctggctcatgataggggctccaaaaagttagttattgaaattatgaattgcaggccttatcagagccttgaatgtgccaatgggatgtgccagttaacctcttaataagtggagccaataataaatagttcataaggttgtgtgaatggcagcagagctgagtggttaagaacaaggaggctagagccagtgtctgggctcaaactccagctctcccactggcttgctgtgtgaccttgggcaggtgaattcacgtctctggacctcagttttttcatctgtcaaatggagctaagcatagtaacaacctcagagaaattaaaaaaaattttaaggcactcagaacagtgcctggcactgagtagataccacataagtgtttccttagtaaaatcgataagtcaactaaataaaaaagtactttaaaggtacttttatttattactacccagggtgagttgccaagaggcagattatagaaagcagcttctcccccatcttatctgacatgatccttcattgtcaagaagcattttgagcggtcaggctttcaagaaatatccctgggagacattcaattctaaaacaacctccgagccactacgacattcatgggataaatttctcccctaaatagtctatccatttcaaagatgcccaagacagaaggccatggaactcagacactatccgcccagaatctaaacccttacagagtctaggttagaaacagagttcaggtcctagggctgccacgtgcagttgttcaggctgtgtactgcacaaggcagccatttctaagggggtgcctcttacatcacagtgaagatttgtttatttatgacaaatttatttgttgtttaggacaaatttatttgtttatttatgacaaatttgtttatttattgtcataaataacaatgattttctagtggatggcaggacaggggtctcttccaacaaagtatattgtgacaaatcatcttacctgacttacggaaggagcatccattttcaacttgttcaaaggtatccctggactcatggtggtcaacactcactcattgccctctatctggcctgacttccgccaccctggtgggagccccaggccccccctgcccttgctgggggccatactcacgggttggtcgtggacaggatgaacatggagctatagggaggcattggcttagggccgtcttccccacggtcgtcttcctcctcctccttcttctcttcctctttttttggcagtgggtctgggttggcgtttttgttcactgttgggacaagaaccaacacagggctccctccacaatttcccacaagtctctgggaactcctgtgtactcccagggcaggcaagaagcggctgacatttctaaagtgcctgctgtatataccaggcatcttatgacatcactgaacccttgtatagccctgaggttgatatattctgatctcctgtttacagatgaggaaattgaggcacagagaagtaaagtgacttgtctaaggtcacacagcaggaagtggcagagctggcatttggaacccaggcggcctggcccccgagagcctgctctcaaccactctatagccttgagtgcggtggggccctcatgggatattaacacagacctgcccctatcctcgttggaccttcacaccctcacttgcaggcaggtagggagagtgccaagagacccactgaacagatagaaatactgagacctcccataaactgcatggcatgcccccattagcacccctctcttgactcagggggaggagccatcagcctctggagcttccattctgcagcccagcctgcttatgtgcccacgggcaggctgagcctctctgagcctcagtccctacatctataaaatgggcacagtgacaagaccttaggatcttaggtctcaggaccatggaaagcctttatccagcaaactcatgaaaatctctcacatagaactgacactagatgaacttaagacataatccacccagcagttcaccattttttttttttttttttttttttgagacagtctcgctttgtcacccaggctgcagtacagaggtgccatcttggctcactctacctcggcctcctgaagtactgggattacaggcatgagccagtacatctggccccttttttaatgtggcgactagagagtttaaactgacatttgcatgtggcctgtgttacatttcttttggacagtgctgggccgagagaatcaatcatctgaccccctcaagcttccatcagaggaccctattgctcctcaaatggggtggcttcctggctccccttgggaaggaaggacgtagaagatattgctaacccgactgaacacaaccccgtgccaggcactgtgcacaaattatctcactgaaccctccacagccctgtggggtaggaaactacgcctatgcccattttccaggggaggagactgaggccagagagatggggtcacagtccagggtcactcagcagagcctctggctccagggacgccaggtcccctgcccagtgatgtgagagcagagggtctcaccttgtacgacggtgtggttgagggggggtgggcaggctggggggatgtccactgtggtgtggtcgggtttcctggcagtcttagctgaattggtctgggtgccgctggggttggtgacgataaggctattctcgggggtcttgggggggccgggattggatgggttccccgggttgttgggcgtccggcggctggcggcgttctgggggttggtggccatggcagggatggccagcatggggccggggtcggtgctgtttcccatcttggctgggctctggggcaggccggcgtggccaaggctgccgtggggagcggccgactccgcggtggccagcttgttgttcttcatgttgtcaatatcctctgccaggggtgggtcttggcggcccaggtcctgctggattggccgggtggttgacaggttggggcccgacacagggaccccggagccctggttctctctgaggaaggcaagtgaatgaaaaagaaccaacaactgatttaggataaaaggcaacagttcaggatcctagctaagattccatctttcaagagtacaatttgggctgggcgcagtggctcacgcctgtaatcccagcactttgggaagcggaggcaggaggattgcttaaggccaggagttcaagaccagcttgggcaacatagtgagaccctatttctacaaaaaatgtgtaaattgacgggcgtggcgctgtgtgcctgtagttctagctacttgggaggccgaagtgggaggattgcttgagcctgggaggttgaggctgcagtgagccgtgatcgccccactgcactccagtctgggtgacagagtgagaccctgtcaccaaaaaaacaaaaaagaaaaggaaagggtacagtttggtcatggagaagtcatgtcccagatccctgcagtgcctggaattgagaggagcctgttcacttcttggtcagaggtcaagaccttcacgtgcccatggacaggtttccacaactccccatcatcttatttcttttctttctttctttcttttttcttgctctgtcgtacagtggcgtgatctcggctcactgcaacctctggctcccaggttcaagcgattctcttgcctcagcctcctgagtagctgggattacaggtgcccaccactacgaccggctaattttttgtatttcagtagagatggggtttcaccattttggccaggctggtctcgaattcctgacctcaagtgatccacccacctcagcctcccaaagtgctgagattacaggtgtgagccactgcacctggcctctttttttttttttttttcagacagggtcttactctgttgcccaggctggagagcagtggcaggatcatagcttactgcagccttgaacttctgggctccagtgatcctcccatctcagcctccaggtagctgaggctacaggctcacgccaccatgtctggctaattttacaattttttgtagagactggcgtctcactatgttgcccagggtggtctcaaactcctggcctcaagtgattcttcctcctcggcctcctaaaatgttgggattacaggcgtaaaccacaatgcccagcttgtttttaactttcttattcttagctgagttttcactgcctagtacagggcctctcacacagtcaatgctgggtaaacttactgtcaaatgataaatgaatacccccattttctttttctttctttctttttcttttttctttttttttttaactgagacagagcctcactctgttgcccaggctggagtgcagtggcaggatcttggctcactgcaacctctgcctcgtggattcaagtgatcctcgtgcctcagcctcccgaatagctgggattaccagcgtgcaccacaatacccagctagtttttctattttcagtagagacagggcttcgccatgttgcccaggctgcttgaactcgtggcctacagtgatccacccacctcagcctcccaaagtgctgggattataggcctccctaagtgctggatatatagagccaccgtgcctggccagaatgtccccattatccagatgaggatactgaggccccaggagagatcccacagcctcaaacctcccatcaacccctgcctctccaagccatggacacctgggccctgcctcttgccatctacaggtggacaaagactcacttagtagcccatctgatgccttctggactacagacccctggacaacacagccctggtttcccataaatctatctagaaagaataaataaataaataagtaataaataaaaggctggctttccccagagggcttcccactggctaaactaccagcaccattctcctcattttatttttgcattttaacttgcaaaaacccacggtgtttttagtaagtggaagagagacaagctaatttattttcagaccaaagtaggtaagtgggatgcttctatgaatacttcccggaaggagaaaccgaggcagttccactgtttctctgagactgcacaggggaaatagacaggtccaagcaactttctgccttctcagttttgtgagtgggtcatagagggacatttcagaagacaggctgacctgggtttgaatctcggcaatgtctttttttttttttttttttgagacagggtctcactctgtcgcccaggttgtagtgcagtggcgcgatctcagctcactgtaatcgccacctcccaggctcaggcaatcctcccacctcagccttcccagtagctgggacttcaggtgcctgccaccacgcctggctaactttttaatttttctttttgtagagatgaggtctcactatattgcccaggctggtctcaaactcctgggatcaagcgaccctcttgcctcagcctcccaaaatgctgggattataggcatgagccactacacacagggaaatctcagcaacatcactagctgtgcaaccctgtgtgatttgcttaacctctctgagccttagttcccacattttaaaatttgggataacaggagtagaaccttccccatatcctggagactgaagcaatgatcctggaccttctttaccacataatctccagtgagttacttagcctcagttcctgacccataacatgcgggccgtaacctcattgagtctggctctgagaactaagtatgttaatgagctgagagtcaccgaggattattctcaggccttgaaacctaatgggatttgtcttgctggatttagcacttgcttaggactggtgacctctttatcccttccaatttctcccttttgcaatgggaacgtctatcctatgcctgtcccgctgttatattctggaaacatacaaagatcacttgttctgtagtttctatattatatatataacatatatattatatatatttatcttatctatcttattttttgagatggagtcttgctctgtcacccaggctgaagtgtaatgcacgatctcggctcactgcaacctctgcctcccaggttcaagtgattctcctgcctcagcctccagagtagctgggactacaggcctgtgccaccacacccggctaatttttttttttttttctgtagttttagtagagacaggattttgccatgttggccaggctaaaactcctggcttcaagagatccattggccttggcctcccaaagtgttaggattacaggcgtgagccaccatttctggcctaaatgaggtaaattctaaaccaatatttcctcaacatcttggacagtccacaaagaaatccctaattctaacctgcttgtgatgctttttgagaagttgtgtatcatgaaaacctggctgagagtattttctcatcatctgtaatgtgtgtgtgtgtctgtgtgtgtctgtgtgtgtataataataataatatatttttaagagacagggtcttgctctgttgcccaggctgaagtgcagtggtatgaccatagctcactgcaacttttaactcctgggctcaagcgatcttcccaccctgggtagctgggattgcaggcacacactgccatgcctggttatttttattaatttttgtagagacagggtctcactatgttgttcaggctggtattgaactcctggggctcaagagatccacctgccttggccgcccaaagtgctgggattacaggtgtgagccaccacgcctggccctgtgtatgtatatgtgtatatatgtgtatatatatacatacacatatatatacacatttcagagagtgatatccctgccataaagcaggcccagttaagttataatttcaaagagaacctaaatcctttggccaccagctcaagaagccatggagaaactcgtggcggcattttcttagaggaataccatctaccaagagcagatggaaaagggtctgccaatgtgttttgtcttgtttttgcttccttgtagagcgtctgttggctctgtttgttgggaaattttaacaagctcagcctgcagaggcctaatatcaatttccgggaggtttcatttccaaagtgtctccaaggagaactcaaaaggggcagaaaactttgaagctgcacccctacccccttctccctggggatctggcatcctctgcctggaataggtggccagttgcataacacctgctgtgcgtggcgttcttgtgccagctgatcacttgggcatccttctgcagagggctgtggacaccttgcctggggcacactcagaccctgagatcggattatgtgggggtgataataacagcagttcctgtttattgcttatctcgtgtccccaccccctgtcctaaggacctcacgtattaactcatttaatccctgcaactaccaccatccgagatgggtatagtgatcagccccatttcacacaggaggagactgaggttcagagaggcaaagttacccagagttacccagctggaaaacagctgagctgggctctctggtgttcaaagctttaatggggcagcttggtacagtggcttacgcctgtaatcctagcactttgggaggctgaggaaggaagatcgcttgagcccaggagtttgagatcagtctggggaacatagtgagaccccatctctaaaaaaaaaaaaaaaaaaaaaaaattagctgggcgtagttgcacgagactgttgttccagttacttgggaggctgaggtgggaagatcatttgagtccaggagtttgaggctacagtgagctatgattgtgccactgcactccagcctgggtaacagagcaagactgtttttttttaaaaaaaccaacttgggcccattgggggtaccgtaagaattagagtgctaagtaattaaccactccctacccccatgcaggataaactgtggagctcaaaagtccagcatctctcttcctgttccttttggggagcaggttgtcatggtgacagatgcaggtggaattaggatgcgaacagcagagataagaattctagagtggagcaggtcttggcaaaagttccctttgcaagcagataggcctgggagaaggcactgcctggttgcaagggagaggcagaagctctgtcctccatagatttttactgacagtctgggaaagttccaccctcattttgtccaccctgcagggccactgggctcggccacctggtatgggggatctggggccagcagccattgaattatatgaaatagaatgtgcgtcagtccacttttcactggagtgagccactgaaagacagatgaaggtaggaatgaggagaagacaaagtgaataaaaaggaaaaaaatatgatcggcctggcaaggtagctcgctcctgtaatcccagcactttgggaggctgaggtgggaggatcgcttgaacccaggagttggagaccagccttggcaatgtggcaaaaccctgtgtctacaaaaaatacaaaagattagctaggcatggtcatgcacacctgtagtcccagctgctcgggaggctgaggtgggagaatcacctgagctcaggaagtcaaggctgcagtgagccatgattgtaccactgtactccggggcctggatgacaaagcgagaccatgtctcaaaaaaaaaaaattatcaatatgctggagaatgaaaaacacagggtacgtttgcaaaaagcctcaaggaatgactgaagaagaggaaaaatgtacaaggcagacctccgaaggccactggctttgtcacaacagagaacgaaaatgtctttttattattttatattctcaaataaagttttatctttgccactttttttaaagcagatgaatgactgatcttgaatttttttctcttaaagtgcatgaatcttcatgaacttttatttccaaagagccttagaacctctttatcagccaaatgaataatgtctctcccggccagattgtttgatgtgtctattaataatggaattagcagtactcccctggttcagaatgggggtctggccagctgaggctatgggggtgaaagtggggagatagtttcttcctctgaagaagagagggagcaggaaccatctgtgggatttgggcaagctgggtccttattgctttttatgtttattgatgagagtattactaacagtattagctgacacttcctgagtgcttactattactgctaaaaatagcattcattgagtacttaataatattcatattaataatagctaacatggccaggcatggtgtctcatgtctgtaaatccagcactttgggaggccaaagtgggagaatttcttgaggccaggagtttgacaccagcctgggcaacatagtgagaccccaaaatgctacaaaaaattgctaacatttattgagctcttggtataagccaggaaccactcaaagcattttacacgtactaactcagttaaatcttttttttttttttttttttttttgagatggagtctcgctctgtctccccggctggagtgcagtggtgcgatctcggctcactgcaagctccgcctcccgggttttacaccattctcctacctcagcctcccgagtagctgggactacaggcgtgcaccacctacgcccggctaattttttttttttttggtatttttagtagagatggggtttcaccatattagccaggatggtcttgaactcatgaccttgtgatccgctcacctcggcctcccaaagtgctgggattacaggcatgagccaccgcgcccggctcagttaaatcttatacccagagaaggaggtagctactattcttatcttcattttatagatgaggaaatggaggcccagagaggagtgaaattctgaaagtcacacagcctggaagtgatagggcaggaatgtgactgcctgccccaaagtccttgcctttcacaaccaggctttgctgctcttgtagtttccaatgtttactgttgtctttcaaaaactcttcctggcatattgttagggagagacattttgtccctgtcactctgcctccttcaataacagtagatctgttaataaggctgataataacagtaatattagtaataatagcaagagtaattaataatcattggtctttcttttttttttagacatgaggtcttgctcatctctaaaatgagcaatgctactgcaatccaacctgggcaacagagcaagaccctgcctcaaaaaaaaaaaaaaaacaaacaaaaccctaaataaaccaacaaactaaaggcacagataattataagcaagatttttcacctgtgtgaggagcactagaaagtcatgaagaggaaaggataattcttttccatatgagactgtcttgtacatggtagggtatttagtatactggcctcccattctctaaatgctcaggctggtctcgaactcctgggctcaagcaatcctttgcctcagcctcctgagtagctgggattacaggtgcataccactgtacctggctttttttttttttttttttttttgagacagagtcttgttctgttgcccaggctggagtgcagtggtgtgatctcagctcactgtaacctctgcctcgcaggacaattcttgtgcctcagcctcctgagtagctgggattataggcgtccaccaccacgcctggctaattttttgtatttttagtagagacagggttttgccatgttggccaagctggttctgaacccctgacctcaggtgatccacctgtctctgcctcccaaagtgctgggattacaggcgtgaaccatcacactggcctgtacctggctcttcattggtctttactatacagagagtgctgtggtaaacactttattccacctaaactcccgttttgatctctcattcccctgagtgactgacagccccagagtctcatcaatgcaccttcaatttctttgtcactttctcgtcactagtcatgtcctgcaaactggcctccttctggtccaccccagggcctttgcacatgctgttgttagactgaaacactctactcccttctcagattgctcctctggaaacctgccctgagaccctgggagcagtttcttggtcgtatttctcagaatgtctcagaccacttcacttgcagttgtgtgactgaactcacagcatgagcttagaatatagtaggcacttagtaaatactaactgaatgaatgcataaacccataggagaagattgaagcgaaagaatgacctagaacaatggttttcagaaaactgttgtagaactacgtggaaacctaataacataatgattgaggggcactgcaggcacttagagaatggtaggcagttatactaaataccctaccatgtacatgacagtcccatatgggaaagacttatcttttcctcttcatgactttctaatgtccctcaaagaggtgaaaaatcttgcttgtaattacctgtgcttttagtttgcttgtttgtttgggttttttctttctttctttcttttttttttttttgagacaaggacttgttctgttgcccaggttggaatgcaatggcataatcatagctcactgtaatcttgaactcctgggctcaagcaatcctcctgcttcagccttccaagtagctagaactacaggcacctgccgccacacctggctaattaaaaaacttcttttgtagagatcgaggtctccttatgtcgcccaggttggtctcgaactcctggcctcaagcgattctccttcctcagcctcccaatgcactgggattacaggtgggagccactgcacctgatcctgtgcttttagtttaaacctaactcttttacataagaacacaacatattttttgtatgtttttaatatacattgcattttcctgcaatgcaactattaaataaatggaagaaagactagactcttttgtatatggaactttgccaagaggtgttcaacattgtggaacatcttgacactgctggcaactcccctcatgtggtttgaattgtccacacaacccagagttagccatcatttgtgcctgtcacttcatggtgattttgtgtatggtgtacatatcagaattacttcactatgtcctccagagtctcattactcaaaatgtggtccctggaccagtagtatcagcctcatctgggagctcgttgcaaatgcagaatctcaggctccactgagtccttagccctacggaattacaatttgtgttttaacaagatccctggggattcacatacacattagattttgagaagtgctggcctacctcatatgtcatacaacaggatcacttaaacccatcattaaaaaaatcaatattatgccctgatggtaatataaaagaggactaagagcaggttaatttgtaataggacaatgtctacgatgtctattttaatgggtaagttgttgagtccctatatgcagaatcactatagcatctgctagaaagtattacaaaatgtcgttatgaaaaagaggatgctggttctgaatggataagttgctggcctggaagatgcctcaaaagctttctaacatttttatttatttttaaaaggtgaggtctcactatgttgcgcaggctggtcttgaactccggggctcaagtggatcctcccaccttggcctcccaaagtgctgggactacaggcatgagccaccacatcccgctgcatccaaagctttgaaactctgctctcccttcaattctaacggcccaaagtgccttttctttttctttattttttattttattttttgagacaaagccttgctctgtcgcccaggctgaagtgcagtggtgcaatcatagctcatcatagcctagacatcctgggctccagtgaccctcctgcctcagcctcccaagtagttgggactgcaggtgcatgccaccacatctgtttaattttttatattttatagagatggggtctgcctctattgcccagactggtctccaactcctggtatcaagtgatcctcccaccttggcctcccaacagagtggcttttcaaacttccaaagaatagcattaggtaaatagagttggctgaaaatggccaaaaatgctctaaatttaccgagcacttattatgtgtcagctgctcttccaggccctttgcatacattacctcattcaatcctggcaatgacccaattagatcccactatttccattgtgtgaggcccagagatatgaagtcactttgcaaaagtcacacagcaagaacacagaagactatataattctggacgacagtggggcttctcttaatagtttccctgaaatgctcaaggcctctggtgccagagagcctgggttcaaggacactggttagaggaatgaccttgaggagctcactcaatctctcagtttccccatctgtgaagcctctaatccgaacactttgggagactgaggtgggatgattgcttgaggccaggagttggggaccagcctgggcaacagagccaggcctcatttctactaaaggtaaaaaaattaggctgagtgtggtggctcaaccctgtagtcccagcactttagggaggctaaggcaggcggaatgcttgagttcaggagtttgagaccagcctgggaaacacagtgaaaccctgtctctacaaaacactgtctctacaaaaattagccaggcatgtggcacatgtctgtggtcccagctacttgtgaggctgaggcggatggcttgagcccgggaggtagaggctgcactgagctatgactgccactgcactccagcctgggcaacaggcgagaccctgtgtcaaaaaaacaaaaacatacagcatttttttttttttgagacagagtcttgctctgttgcccaggctggagtgtgatggcacgatctcagctcactgcaacctacctccacctcccaggttcaactgattctcccgcctcagcctcctgagtagtgggaatacaggtgggcaccaccactaatttttgtatttttagtagagacggggtttcactatgttggccagcctgttctccaactcctgacctcaagtgatccgcccgcctcggcctctcaaagtgctgggattacaggcatgagccactgctcctggccaaatacagcactttttttttttttttgagacagagtctcactctgtcgcccaggctggagtgcggtggtgtgatctcggctcattgcaacctccgccccctgttttcaggcgattctcctgcctcagcctcctgagtagctggggctacaggcgcctgccaccgtgcccggctaatttttgtatttttattagaggtggggtttcaccatcttggccaggctggtcttgaactcctgacctcgtgatccatccgcctcggcctcccaaagtgctgggattacaggcgtgagccactgcgcctggccaaatacagcattttataatatatttttataaacaaatacacagcacgtgctactttggctgttgtcattattaatgttaccgtcattctgcggattcgaggtcacctccacttacttcctcctccgatgcctccgctccttgtcctccctccgcgcgtccccctcgtacgtggctggagcgccatgccggtgccttctcctgcgctcgcccccgtcggggccctcgccctcgccctcgccgccccgggccggccggctgccctcgcggtgccgcgccctccgctccgccttgtcctccggaccctcctccccgggcctgcggtgcgcgcgatgacgtcgatgctccccgtccgcgcccgtgcgcggggacccgctgcggctctccctgctgcccccctgccggtgcacgtgcctccggtgggggtccccggccttgcctcgctcggcctcgccctcccagaacccgggttgctccaggctgccctcccgggcgtggtggtccgactcgcggccgtagggtccctcccggctcagctcggcctcctggcttcccgcccagggcctccgtgcgtccaggcccgccgagccgctggggtcccgggcccgatcgtggtagcgggcctgtttcctgaggaagtcctcggcgcgctgctggccgaggcgctggtccacggtgggctcggccgcccggctcttgttggtgttgttgttgcggttctcctgcgggtccaccaccagcggccggtccaagtgcgtcttcatgtctggccgcaggtgccgcgtgtaggcagccttccagcgctcgtccgggtccatttcgttatacagggcctcccggctggccagcaagttctgctttcgcatctcactggtccgctgctcccacacggacttggctggcttttgattcttctgttgctctttcctgcagtggcatggtcacaggacttagagcattgctaggcactgtagcttggatggatgacccaggcgaaccaacccacatctcagcctcccactcctgctctccaccctctactccccactgaatgctaggagtctgtgagcatctgagtcaggtcccagcctcctctgctcaagaaccctccatggctcccacctggctaggggcaaaagcccaagtcctcccccctgacccagaaggccctgtgtaatctgcttgtcacctccttgccttcacctcctcacacttactattcgattctagtcacacaggcctccttcacatcaggcatgttcctgcctcagggccattgcctatgctgttccctctgcctgggatgcccttccccaggccccccagtggctcctccctcacctccttcaggccatgtaaccttctaggtgagcagtccccaacctttttggcaccaggggccagttttgtggaagacagtttttccacagacctaggtgtggggggtggttttgggatgaaactgtttcacctgagatcatcaggcattcgattcttaaaaggagcacgcaacctagatccctcagatgcaccgttcacaatagtgtttgtgttcctatgagaatctaatgctgcctgctgatctgacggcaggtggagctcaggcggtaatgcttgcttgctcactgttcacctcctgctgtgcagccccgttcctaataggcctcggcctggtaccagtccacagccccgggactggggacccctattctaggtgatgccttccctgacaacttcgtttaaaatcacaactctcttcactcccagcatttgctatttccctcccctactttctctgtagttccatcgccttctaacacaatatataatttacttatttatctaatttattgactccttcccttgctagaatggctacacacaggtgggattttttttttcctccttgttaatgctgtatccccagaagttagaacagtgctgggtacataacagctgctaaccaaatatttattgagtgaaagtgggtggaaggacaagaagtgtctcttcctaaagctcagttctgtcaaggaccacccccactgcttcccaaatctgtgcctgggatagtgtggacgttcaggagccagggtagcatcccagggattaggggcacttacacagctatagacatgttggccgcggacagaggactcacttctgccacctccttggctttctgtagggcaagtttctggttcgctgcttcttcttcctcttgctcgtcctaaaaggcacgtggaatctttgttcacaaaacatgaactaggccttggggactcacttctgaccctgttgctgaccaggggcaacatttgaaatatttcgaccaatcagaaccaaggctccccaattggaatgggtacctgctattggttaagtgtattgctatcccctctgtgtataagtttgacatctaactcattatgaagcctattttaacacacagccagataacaaaaaataaaaatgtcccttctcttcctacaatgaagactttcctgcagcctatttttttttcttttgtttgttttcagagacagagtctcccttggttgcccagcctggagtgcagtggcacaatcatagctcactgtaaccttgaactcctgggctcaagcaatcctcccacctcagcctcccaagcaactgggactacaggtgcatgccactatgcctgtatacatttaattttttttttttttttgtagagacagggtctcactatgttgcccaggctggtcttgaacttctggcctcaaatgatcctcccatttcggcctcccaaagtgctgggattccaggcatgtgccaccatgcctggcccctgcatcctgtcttaatgagctggaaagcagtgcaaagattttcctctcactaggctttctgagccatgtgaactctctgaaccaactttcaaaaaacaccaactaccctcacacacagaagagcctggcatccgatggcccctgccatgcactgtcaacagcccccagaaggagaatgaggagaggaatttatattcccagcccccatgacaggaaggcggtggggagaggagagcagggcacttgggctacagccaactgcccagggtgctgctgctcactggtggttaggttcagagaggaggagaatgggggaagaggttttaaaaatacatacagaaaaagacgtttttggactttaaatccttcttcagccttcatgcagggcctcattcgtaaaacagaaaagccaacaaagaaaaagcaaagaaaaggcaacgagaaagaaatggccagaaatgaacccgcccataagaaaagtcatgccattgcaggcagctctcccgctgtgctccgaatcactggaacggggagcaaccttaccaccttggaaatggtcagatcaggacactgtcagagacaacatggagatgggatctggctggccaccctgctctcatagggccacccccacccctcctggcaccattcccagcatttttcagagctaggtctctggaccatctgcctcagaaacacctaaaatgcagatcctcaggctccccaaataatctatagaaccagtgctgggccctggaatctgcatttcccacaggttcccaagtgagcataaaacatgcccaaattcaagcaactggtacacagcagttaagagcacaagctgcagacccagacggcctgggttcaaatcccagctccacaacttactgctgtgtggccttgggcaagtctctcaacctctctgtgcgacacacatctcatctaaaattccaactctccctgactttccctactgaatttttctctgttgtgtttatcaccaactgacaagctacgtatgtttacaaatttatcttgtttcttgtctgtctcccctcttgaatccctgctccacggaggcagggatttttgcctttttttgttcactgcttaatccctaagtcctagaccagggccttggtcacacagtaggtgctcattaagtgcttactgaatgatgaaatctgtaaaatggggctcagagaacttggctcctaaggtttccatgaggactgaataggattaaaaacacgtattaaatgaccaagaaatgcttgtaggatcaatgaaagaaagaatgtggatctggagaggaatgtccacacctcccaggagataaacgaactggcctttctccctccccttctgctaccctcctgcaccagcccctaaggatggactcttggaacttggatgagctcatggctggatcagccctcggctcagccatgccagccagctccacagtggccaggcttgtggccgtgtgcttgggatggcagagacttccgcttccctccactgggagctggggccgggaaactctctctccctcctgccagggccggcagatggagcgttggcaacgtctgcttggtttggttcaatttcacaaacatgtcctgaatacctcgaggcactggaggtggggctgcaatgctgagggagaccccagggctgagaggaagaccctgtacctgttacatgtaatcttaacttaatagggtccttggggagaggcttaggctggacggaggctagctcttaacatgctgcgtttggctaaggggaggctccagcgggaagccagaggaagagagaaggtggggacatttattggccactccatctgtgccttgccatggttctgggttctctaaggtcccagggctggtggcagccctttttccttggccccagctctgactgggtccccataacagcactccctctcccatccactagcctgggggctacaccattccttggaaaccctgcttactccctgtaaacggccttttggttgagtttgccatccgtttcctgcagcgacctcactgccttcccccttcccaccctcttggctgtagaatttgcttgatgagggacagtctgtttctgggagtggggggagaggcgccttctctttgcatggtgcatccccggcaaaagttctaaccctgttcccatgcccccacccccacccccacccccacccccacccccgtcctgatctgccatgggcaggtggtaactttgccagagaaacattctcccaccgcctccaccttggtgagctcctgggcgttggccagattgtccacagcgatggccaagaacacattcaggagggtgtctgcaaatgtctgagtcaggaaaagcaaccactggtgggacaccacttgggccctgggtatctgggtctctcagtaccctcccttgagcccctgcaacctctcctctgccagaggtccaggcctgtccccttctctctctccatgaaggatacagttcccaaagagcgtcagtacaatgaaatagatggagaacaccatgccgccctgcacgcccccctgagacttgatcccgtcgtacatgacctcgttccagtcttcgcccgtcaggatctgaaaggggaggaagaaacacacagccaacccccctctcagccacgggccccttggagatgcagctgtggagccggaatccgcccaccccatccccgagcccaggaggtctttaacaatcctgcccggtttgcagagccagactccgtgttggcttctccttggcttttctctttgtttgcgagtagaaagggccgttcctgcgtcgtggggctcttagcctggcttctaggaaaatgggaccctggaggagtcacagaccctcctgtaactctgtcttacttgatgtgattaaggggatttgttatggactaaattgtgcccgcctccaaattcatgagttgaagccctaacctatgatgggatggtatttggagatggggcctttaagaggtaactagggttagatgaggtcatgggggacttcatgatggtattagtgcccttataagaacaggaagagaccgcatgccatggctcatgcctgtaatcccagcactttgggaggccaaggtgggaggatcacttgagcccaggagttcaagattagcctgggcaatatagcaagaccccatctttacaaaaaatttaaaaaaattagctggtgcccatctgtagtcccagctactcaaggggctgaggtgggaggatcgtttgaacctaggagtttgaggctgcagtgagctatgattgtgccactgcactccaggctgggtgacaaaaaaatgtgatttgcctaaaaaaaaaatagatttttttttgagatttttgtctcaaaaaaaaaaaaaaaaaaagaacaggaagaaacatcacaactctctctctctctctttgacatatgaggacacagcaagaaggtggctatctgcaagctaggaagagggccctcaccaggaactaactaaccctgctaacactttgatcttggacttcccggcctccagaactatgagagaataaatgtttcctgtataagccacccagtgtgtggtattttgttatggctgcctgagcagactaagacaggattttaatatttacctgtgttcctcatgtggtcatggtgatgattaaacaagctactacgtggatagcacaaatgtagcacaaggacacgtttggggtccccctgcctgaggcagaccctggaacaagggttcgggtgcaagtggtttgtctgggaggtgatctcaggaagcaccagtaggggagaggagaagtgagaaaagggaaaagagggtggaacgtaaacagtatgtgatcaagcgagtttccactgtaggtaaccggggcttggtcttgctggggagctctaggggtcatcccacctgagggtgagggagctggggtatttatccaccaacggctgctccttttaaggtgtggcacaaaaaattcacagtactgctggactgcagttccttgggggcagagcaggggaccagagaaagaccaaggcaaaggattaggtgttgacagacgcaagttgtgctgatgcatactgaaagaaccaaggggatattcaaacagcacctacatgctcctttaaaaaagatccaacttccttccttctatccatatccccatgaggataaagtaaatgttaaagaactccaaaaacatgaatctgctaaaacagggtttctaagcctcagcactgctgatatttggggccagattattctatttggggctgtcctgtgcattgtaggatattgagcagcattcctagtctccacccaccagatgccagtagcaccctctccctagctgtgacaaccaacaatgcttgcagacattgctacatgtccttggaggacagacttgtccttgggtgagaacctctgagctaaagatacatgactagcgatcagtgctattaataatcgcttatgggccaggtgtggtggctcatgcctgtaatcccagcactttgggaggccgaggcaggcagatcacgaggccaggagttcgagaccagcctggccaacatagtgaaaccctgtctctactaaaaatacaaaaattagccaggcatggtagtatgcacctgtagtctcagctactcgggaggctgaggcaggagaatcgcttgaacccaggaggcagaggttgtagtgagccaagaacgtgccgtcgcactccagcctgggcaacagagcgagactccatctcaaaaaaaaaaaaaaaatcgcttatgtgggggctcagaacttcccttcatggaaggtttcctcttcaactccctgtcttggggtctcatttagaaactacctccccaggagaaggagagagtgaagtcacattttctatacactctcagtccctcaaagagaaagaatccaccaaagatgctctgaaggtcccggctgggccagtcccaagcctcagggaatgcgcccacatgggtgcagaagttgctttgggttgatcaccctggaatatgagaccaaggtatcttcagatttgatgggtgtattagccattttttttctctgccttttttttaagagacagggccttgctctgtggtgcaggctggagctcacggcagccttgaactcctgggctcaagcaatcctcccgccttggtctcccaaagtgctgagattacaggcatgaaccacctcattggcctggccacgcattttattttctttattctgatgcatctggggtcttgctgactctggagggactgcccggtccagcactagccagtccctagaggtagtaaacaatttagccctgagcaggctttttaaaagcaaaccaaacaatatcccaaccagcccatatcccaaccacctcctttatcttcccagcactatccacctgccctaatcaccccaaggccaggtcctagacaagtaggaacagctcctctgccccagagcccactgaaatgatccaaactagccagtctcgagctgtttactctgcctcacccattccgtcccatggaaaccacaatcaagcctcttgcccacattttccttctcttcctgcttgaccctgttgcttctctgcttggtcctgcatggtgtgctccttctctgaggatctgtgagtataacaaactttcttttcgtttttgagacagggctttgctctctcgcccaggctggagtatagtggtgtgattgtagcttactgcagcctcaacctcctgggctcaagcaatccttccacttcagctgccctagtagctaggaggtatgtatcaccatgcccagctaattattattattatttttttgcagagacggagtctcactatgttgcccagacttgtctcaaactcctggcctcaagtagtcctcccatcttgacctcccaaagtggttttttttttctttttcttttttgagatggagtctcactctgttgcccaggctggagtgcagtggcgcgatcttggctcactgcaacctctgcctcccaggttcaagcaattcttgtgcctcatctcccgagtagctgggattacaggcatgtgctaccacgcccggctaatttttgtatttttagtagagatggggtttcaccatgttggccaggctggtctcgaattcctgatctcaagtgatccgcccacctgggcttcccaaagcgttgggattacaggtgtgagccaccgtacctggccaaagtgctgggattatgggtgtgagccaccgtgcccagccacaaactatctttccaatgacattcatctcctgatctgttggcctcaccataattgaataatgataaccataaaatctgtgtttcaaagtggtgtgaaaaggccaggtagagaaggaggagttcagggaagccccttggatgtggagcaggcactttcatctgtgacactgagaggtgttggcccgtggggccaggtggaggctgtacctgaaacaccgtcattattgctgctggaaaagtatcgaagttggtgggaggagtcccttcatcgaaattaaacctgcagggaggacacagacatttcacgttggccccacccggggtgctctgagggtgtggctcagtatctcatctccaaggaaacgaacgtctccatcatctctgtccccaggaaaccctgagtggtacccagggccctgcccatttgggtgaccgcaatgggtgtctgggctacgaggaaggcagcctgcacggtggaggggactgtgtgttccctgagcctgaccccagggaaccaggagttggaattcctgtgaaggacttactggccgccgaagagttgcattcccaaaagggcgaagacgacaatgaacaggaaaaggagaaacaacaggctgatgatggacttcatggagttgaggagagagacgaccaggtttctgagagatgcccagtacctgccgacagaggccaggcgaggactcaggccaggcgggggaggcagggccccggagtcagccctcgaaacacgaggctcactttcccaactttctggaggcggccccaccatgtcccccatccccaccccctgtacaaatgtccaggaaccccaaagacttactttgtgactttgaaaatacgcaataacctgagggctcgtaacacgctgattccaaaggatgtgccaggttttatgacagcccagatgacctcgaagatgctcccaatgataacctagggcagagaacctggtctcatgtccagggacagtgtctgggctccagaactggcaagcatttcctaggtaccaaccttgcaagaactcaaccaaactcctccctccaaatggaagccgggtgaggatccttgaccccctcattcatccattcatttatctatagagaccgggtctcactgtgtcacccaggctggagtgcagtggcgcaatcatagctcactgcagcactgtcctcctgggcttaagtgatcctcccacctcagcctcttgagtagctgggattacaggtgtgccccaccacatctggctaattttaaaacatttttatagagatagtgtctcgctagtattgcccaggctggcctcaaacttctgggctgaagccatcctcctgctttggtctctccaactgttggcctccactttccaaagcattgagccactgcacccggcctcttatttatttatttatttttatttattcatttattttgagatggagtcttgctcttatcacccaggctggtgtgcagtggcgcgatctcagcttactgcaacctccgcctcccaggttcaagcgattctcctgcctcagcctcccaagtaactgggattacaggcacccgccaccacgcccggctaattttttgtatttttagtagagacggggtttcactgtgttggccaggctagtctcgaactcctgacctcgtgatccgcctgcctcggcctcccaaagtgctgggattacaggcgtgagccaccacacctggcctcttttttatttattaagagctcccacaggcctgagaattcctgaaacacataattacaaagtgaatgtcatgcaactactacctatgtcaacaattaggagaaggctagggcagtggctcatgcctgtaattctggaactttgggaggccgaggtgggcagatcacttgagcccaggagttcaagaccagcctgggtaacacagggaaaccctgactttacaaaaaaaaaaaaaattagtcaagcatggtggcatgtgcctatagtcccagctacttaggaggctgaggagggaggatagcttgagcctaggaatttgagacaggagagggtcatgatcctgccactgcactctagcctgggcaacagagcaagaccctatctcaaataaaataaaaaataaaataaaataaaaagggacatgtggataccctggaagtttccagagacactgtgatataactaccatcctgaattttgtaataaccattttcttaccttaaaaaaaactgaggtgaaattcacataacataaaattcacactttgaattacacaattcagtgcctttaggtacatgcacaatattctgcaactatcacctctatcaagttccaaaacattttcatcacccccaaaggaggccctgtccccatgagcagttactccccactctccctcacccagaccctagcaaccactaatctactttctgtctctatggatttgcctgctctggacatttcatacaaatggaattatgcaatacttgaccttttgtgtttggtttcttttaccgagcgttgtgttttcaaggtcctcgcctttttaacgtattcaagtatcatccttaaaaaatacagtttaaggcggggcgtggtggctcacgcttgtaatcccagcactttgggaggccagggcaggtggatcacctgagatcaggatttcgagaccagcctgggcaaattgctgaatcccggtctctacaaaaaatacaaaattagccgggggtggtggtgcatgcctctaatcccagctacttgggaggctgaggcgggagaatggcttgaacccgggaggtggaggttgtagtgagccaagattgcgccactgcactccagcctgggcaatagagtgagactctgtctcaaaaaaaaaaaaaaaaaaaaaaaaaaaaaaaaaaaatatatatatatatatatatatatgtagagagagagagagagtttaattttgtccacttgaactttgcatgaactgtatggacttacgttgctagctcctgcctccttctgtgccatgttacatgggtgagattcattcctgttgttgggcatgtggctgctgttggtggactttgattgtcacagagtatttcattatatagatatgccacaaaatatttatctgttctacagcaaagggatacacggatattgagacttggaactattacaaacaaggttgctcaggacattttaaaatttttctttttttttttttgagacggagtctcattctgtcacccaggctggagtgcagtggtgcaatctcagcttactgcaacctctgcctccccagttcaagtgattctccttcctcagcctcccaagtagctgggattacaggcatgtgccacgacgcctggctaatttttgtatttttttagtatagacggggtttcgccatgttggccaggctggtcttgaactcctgacttcaggtgatccacctgcctccgcctctcaaagtgctgggattataggtgtgagccactgtgcctggcctacttttatttcttagagatggggtctcactctcttgtccaggctggagggcagtggtgtgatcatagctcactgcagcctcaaactgctgggctcaagcaatcctcccaccttagccttctgagtagctggggctacaggtgtgcaccaccacacctggctaattattattaatttttgtagagacagggtcttgctatgttgcctgggctggttttcaactcctgggctcaagcaattctgctgcctcagcctcctgaatagctgaggctataggcatgaggcatcacacccggctttcttttctttttaatggaaagaaattggttttattctttaactacttgggtcatttatgtagggaaggtttgcttgtttgtatgtattttgttttctccaacaacataattttctataatggcagaaaacagtacaacattcagttattataaattattaagctggctgggtgtggtggctcacgcctgtaatcccagcactttgggaggccaaggcgggtggatcacgaggtcaggagatcaagaccatcctggctaacacggtgaaaccccatctctactaaaaatacaaaaaattagccaggtatgatggcgggcacctgtagtcccagctactcgggaggctgaggcaggagaatggagtgaacctgggaggcggagcttgcagtgagccgagatggcgccaccgcactccagcctgggtgacagaacgagactccatctcaaaaacaaaaaataaaaacaaaaaataaaaaaaaataaataaattattaagcctttctgagaccaacaggactatggtaaatgattagggctgccctgggccaggcattctccacttatttgcgaacaaccttaatttcacttccagctgcagggacattctggcctgtgtctcctaggtatctgggtgagattttctaggatgaattcctagcaatggaatgctgggtcatatctccatcttgtagtttttgccctggttcgatgagaaggattggacgtagattattctccaggacttaggttttgtgtggactagtgggttactgggtgttaatcacatttaaaaaataaattaattaactgagtaattcacaaaataacaaaggaccataatggctccataatgccagggtgttgtaatctaacaattatacttcatctacctccacatgactgagctacaaaggaaaagaagaaatagaaatcatattgatgtcctgtttgtaatcctgaagttgggtacttagttggagcgacacaggcaacccacctaaggcatggcttttctcccaacttggaaaacttgtcttatgtcccccacttagctttccaaagggggtctatacgttttcctcccactggcggtggttgagggttctgggtacactgtatccttgccagtgtttgggattgttttctcattccttctgcatccatctgagtctctcatattcaggggtgactttacctttctccctttaatgtgtccaggtatctgtcattccaggcaagagctggagaaatgaactcttagaaacaagagcacttaccccacagtcaaagcagttgaaggaagagtggaagtaaggccgcgtcccaagcccgtacatttttataaacatttcggacataaagagtcctaagaaaatgaattctgcatagtctagaagggagaaggaggaaacagagaggaggttaggcttgctgagggtaggggttccaggtggctctgactttccttttattatcatttttaaactttttattttttgtagagatgaggtcttgctatgctgttaggctggtttcaaactcctggcctcaaacagtttccctgatttggcctccaacatgctagaactacaggcatgtgtcaccacacccaacttctgacttatcttttttctttttaaaatttttatgtggagatgggggtctcactatgttgccctggctggtcttgaactcctggcctcaagtgatcctcccagcacagcctcccaaagtgctgggattatatacatgacccactgtggccacgccctgtccaaggtgtccttcccatgggcctcagtttcccctctgttaaaaaggaagagctggctgggcatggtggctcacgtctgtaatcccagcactttgggaggcctaggcggtcagatcaactgaggtcaggagtttgagaccagcctggctaacatggcaaaccccgcctctactaaaaatacaaaaattagccagtgtggtgacacatgcctgtaaacccagctacttgggaggctgaggcatgagaatcacttaaacctgggaggtggaggttgcagtgagccaagattgggccaccctactgtagcctgggtgacagagcaagaccttgtctaaaaaaaaaaaaaaaaaaaaaaagcaacaattatgccctaccctccaaccaacaagctaaccaaccttaggccgattttaaaaggaatgagaaaaatatcagtgggtctccatcttgtagtttttgccctggttcgatgagaaggatcggatatagattattgccaaggacttttgtgttgactggtgggttcctgggtgtttatcacatttaaaaaataaactaattaactgaataattcacataataacaatggaccataacggccccataatgccagggtgctgtgatctaacaattatatttaatctacttctacgtgactgagctccaaaggataaaaggaaatagaaatcataatgatatcctatttgtaatcctgaagttaagtacttagttggagcgacacaggcaacccacctaaggtatggcttttctcctaactcagaaaacttgtcttatgtcccctagaaatcctgtgttgtgagtgacctaaaaagtcttgagtaagacaaagccttttgttctttgatgagcaagcataaaattgcaaatgcctcagggaggggtaaaacatggatatgcatttgctccagcaaataaatggctgacatcagatccttttctgagagggctttcttggtagggtaggaagatgaggagttaggaagggcgtgggtacttaatggatagaaaggagagatgaggagggtttctgaggagcagaaagcatacagaaaggaaagagacagaggactgaaactaacttccatgaatttcatatagctaattaaggccacaaagctaattgtgtttggtggttgtgatggtttaaatgtttgtgtcccctccaaaattcacgttgaaacttaattgccaatgtaacagtattaagaggtggggccttcaggaggtgattaagtcattacggtagagctctcatgaatgggattaggtgcccttataaaagaggttgacagaggaagtttgtccctcttgctcctccaccttctgccatgtaaggacccagtgttcctcccttccagaggatacagtgttcaaggtgcaatcttggaagcagagagtagctttcgccagacagggaaacctgccaatgccttgatcttgggcttcccagcctccagaactgtgagaaaataaatttctgttcttatcaaattacccagtctcgggtaatttgttatagcagtacaaatgaactaagatatttgccaagggtgtttgctatgtcatgcttttaagaggtgttttgaactgaccgtcaaagtccttcacagtatttatcaccaaaatttctccttatttataggacgctaaggagatcttagtgtctgaggggaactctagggttcctaggaccaaaatatcagcagaggaagtctgtttgtaacatctgacacattcctagacccaccagaagtaactctgggaggactgaagagtttctgagatcttgttcctcagttaccatggaaacatgatagcaggtgatgcacaagacttgaaagaattacttatccttagcattgttgcatctggaagaactttcaggaccatcaaatccggtttctaccacatagatgtggagtctgagatccagagaaacaactacacttcactgatgccaagatatacatttttgtttatattttgacatctctgaaattaatgtgtatctttttttttttttttttttttttgagatggcgtctagctctgttgcccaggctagagtgcagtggcatgatctgggctcactgcaacctctgcctcccaggttcaagcgattctcctgcctcagcctcccaagtagctgggattacaggcgcccgccatcatgccaagctaatgtgtgatcctgggcaatctacttaacctctctgtgtctcagttttctcaaagggaaagtgggaatgagtaaaggacctttatagacactgaggacccaggcaggaagtctcagtcccttgttcctgaaccaggacagactgtacaagatgattagtagagagaatataggagattaaaaatagagtattagaggaagttaaaacacgaagtagagtcctcatttataagagactccagagggactaaaaacaattactaagtttgaaactaggtcagggccctgggaaggagaactggttcctgaggggtgtcctggggggtcagccaacgtgactgggaacaaggagggttataagaagacaatggcctggactaggctcacgggcctttctaggtcaaagactagactgtctcttcttgctgtcctaagtcaattctgaaccaggtcagaaggtcagtgaataaattagacagccagtaggcaaaagacgttttgagaagtccttacttggggcctgtgagccaaagccagggcatccacctgcccccctcactgcccaatcactactctttattttattttattttattttactttattttttgagacagacactctctctgttgctcaggctggagtgcagtggcatgatcttggctcactgcaacctctgcctcctggattcaagcagttctagtgcctcagcctcctgagtagctgggattacaggtgtgcaccatcacatctggctaatttttgtattttttgtaaagacagggtttcaccatattggccaggctggtcttgaactcctggcctcaagtgatccacccacctcagcctcccaaaatgctgggattacaggtgtgagccaccatgcctggccccagtcgctgctcttgttgattcctcgagctctttactttttaaatcctgctcagacatctccccatcttttgctgcttttcctcaccctcacttggccctcaattttgatactatctcatgctaactcacatagaatctgggaataggcccagagggcaaagccttagtgggccttgtaccttgagggagcaaaacgctctcgcagatactggaggggatgttctatgaatgaataaggaagccaaaaagggcaggggaggaagtattaggttggtgcaaaagtaactgtggttaaaaaaaaaaaaaaaaaaggcaaaaaacgcaattaattttgcaccaacctaacaggaaagaagcagaaggtttgaaagaagagagaagtagagtcagaaataagtagagaaaatgagggcaacatataagccactccttatttctaaggcatcctctcttaaccataagttatgaacatttccagagatgtacataaaaattattaatacatgtatgtttctgtttctatctgtctatcttatgagctccgtctttctctgtctctcttccaacatccccttcaccagcacccctctgtccctctctcttagaaaggaatcacaggagcatttgttggtctgaattccagcttccagctctcaggtctaagggagatgggttccattgtcatagcaacagtaacattggccccagtgacagttatagaaatggctaaaggaaagggcagattcaatgaggaccaaagaagatacacatactaccagagaaagagaagtggaaaaagggtgtgagggagggatcagggagttggcaggggtggggctgggtgatactcacaaaggaagtcggagagccactcgggctggttgtagtgaacaatagcaacacacagcgtgttgagagctaccaaactgagtacagtccagtagaaggcctgagttttgaccatgcggcggatgtagaaacgcatcctcctctcctttttgtgaaaaaaggtcgagttctccagcttggcacttttaatgctggctcgggcgaagggagaacctgccagggaaaagatggagaatgtcaggctcaggctgttccttcagaagaaattaaccaatgtgcagcccaagcacagattttagccaggggatccattagtctctccagcaagcctctggcctgagggaaccatcatgacccatgggcttagttttgcatagatggagcttatgagaagacagtgcccctgaaaaataacagaattagaagtaaccaattgatgggaaggctgatagttctctgttgcaggagccaattttccatgtctcccactcccagccacatctgatgcctctgggagtcacaccacagggcaggataaagcagagcctccattccctgatgcaggggcaggcaacagagctgcatggagcacgcttggaaggcctccagaaagagatgtggatgagactgttttccatggacatttaactttagaagtgatcactgaggaataagctgggtgtgtcctctgcctacatatagttttgctcttatgcatttattgagtacctattttgtgccaggctctgttccaggggctcaggatacattaggcaacagagcctggacttccggggtctgaccctctaaggggaggagacagacagtggacgtaataagtaaattaacagtgggatggaaaatgaaaagtgctatgggaaaaaaaaagttgggatgggtgcagtggcacatgcctctaatcccagtactttgggaagctggaatgggaggactgtatgaggccaggagtttgacaccagcctgggcaacacagcgagacaagttcttttaaataacaattttttttttaagagaaaaagtaaagcatcacagagggactgggagcccttggagagtccacagggtaggctgcaacattaaattgcatggtcaaggtgagtgtgttgacttgtcactttagtatcttaggtagaggaaacagcaaatttaaggtcctgaagcatgaatgtgtctgcccgacatttttggggaagagcacaaggaagtcagtgtggctggagtggagtggttgaggggaaaagaggaaggtggtgaaggcagggaggtgacaggcagatcatgcatggcctggtggaccacaaggaggactttggcttttaccctgagtgaggggggagccgtggagggttctgagtagaggagggatggaacctgatttgggtgttcacaggcaccctctggctgccgagtgggagagtagacagtgagaggtgaggacgggagctgggagaccaggctggaggtgactgaacccatccaggcaagtgatgatgatgatggatgggggctggagttgggtggtagttaagcggggaggatttgggatgaatcatttaagacagattcaacatttgctgatggaacggtgtggatgtaagagagagggatgagccaaggtgaatgaatgatgtacatacaaaggaatggatgaattggtgaaccccttaagggatggagctctcatccactgaatgggcacaggtttaggggaaggtcagagctcagttttggacagattgaatttaccttctaaaatacatcttttttttttttttttgagacaggatcttgctttgttgcccaggctggaatgcagtggcttgatcctagctcactgcagccttgaactcctgggttcaagcgatcctcccacctcagcctcccaagtagctatgactacaggcacgtaccaccatgcccgcttaattaaaacaattttgtttttggtagcaatgaggtctccctgtgttgcccaggctggtcttgaactcctgggttcaagcgatcctcccgcctcagcgtccctaagcattgggattccagcatgaattaccatgcccaggcttaagataccttttcttataaaccctcagttgcattcatttttaaatggttcttcattgattgattcattcattagtacattcattcattctttcatccatccatttgttcatttattcattcattctttcatcattcttaaattcattagcacattcatcatttatccattcctttgtgtgtacatcattcatttgctcatccattcatccatccattcgctcatccattcatccatccattcattattcatttgctcatttgtttctccattcattcctccatttatccattcacccatacatccatccagcacgtttatcaaaaccaccccacttgccagacacaggacacagcaaacacctccaaggaggccacttcctatcagcaaaattctcaacagagattttgagttggcaccctaggggccataccgactcatactgggtttgtgaaagctgaaattattggtccacatttaaaaactgggagattttccatgaaaatatggatttcagcttcccctgaatgaaaataacagctgacgtttatggaacatttagcaggcaccaggcactgcagggaacatgttttatacgacaagctacttactcctgctcagagccctaggaagtagggaccagcgtcatccccattttacagccaaggaaacaggctgaggggggtctagtaaccagtgaagatgtgtcaagatggttcagagtgtgtgctctgggccgccacattgcacacctggggcatatggtcatggggcaggggcacattccactcggctgcagttggccaggcccagtggctgtgacctgcttacagggacgcctctcctttctgcaaagacccttcccctcatgtccatcaccttctcaaccccagtggcagctcctcatgaccctgcccagcatttctggccctagttcctgaaactctcaaagatgtgtccagatctgcaggtctccaaagggcttggccaaaagaaataagacccttgggaccttgggggacaggggggatgttccacagatcgagagagagagagagagagagagagagagagagagagaaaccacagcaggtagaaggtccccagcccccactcctgctggagccacactgaaaacctggcttaatcaccaaccagcagatgaccttgggcaagccaccttggtaaactggagacaaccacacttcctacctcaaagggccatccaaaggcataaatgaattaatacatcttagcgtgatgctaagtggtaccttacgattattggatataaatcttctagtacaacctcaagagctgaaatcatgactaggttcacgtgccagccattgagaaagtccttcctgatcactcagcctgaagacacattccccacgacaggcatacccttcactggtaagggagagggaaatgaatattaattgaacacctactaagtgctggaccccatgctaggcactgtcacttctgttagttgaatttcatactcactttgtcccacgttccctttttctatacattcctgtctctcgtttttctctgtggtctggaattataattgcagacaatttctagatttttaaaaatcactttcatgagatgttttattcaacccaatacatccaaaatattaccatttcaacatggaatcaatatcaaggtggattcaaaagatattttatactctttcttttgtactaagtattcccagccggacgtgttattatgaagtacatcctagttcagggtcagccacattcaagggatcaagagccggtgtaactggtaccagtctgaaatgttcttttcctttttttttttttttcttttttttttgagatagagtctcattctgtcacccgggctggagtgcagtggcacgatcttggctcattgcaacctctgcctcccaagttcaagtgactctcctgcctcagcctcccaagtagctggaactacaggtgcccactaccacgtccgaataatttttgtatttttagtaaagatggtgttttgccatgttggtcaggctggtctcgaactcctaacctcaagtgatctgcccgctgcagcctcccaaagtgctggcattacaggcatgagatactgggcgtccgggccagtctgcaatgttctatggtgggggaaggggtatgtcaccgccaaggattcatctggtgatttctggcaatttatatacgcttaaaattatatgtaaattgtaatacagccatgtgtggcttaatgagggagacgtgttctgagaaatgcattgttaggcaattttgtccttgtgtgagcatcttaaagtgaacttacataaacctagatgttgtagcctactccacacccaggctacgtggtttgtagctcctcggctacaaacctgcccagcatgttactgtacttaatactgtaggcaactgtaacatcatagtatttgtgtgtctgaacatatctaaacatagaaaaggtacagtaaaaacacagtataaaagagaaaaggtggttcagctgcatagggtacttggcatgaatggagcttgcaggactggaagttgctcttggtgagggagtgagttgagtggtgagtgaatgtgaaggcctaggatattattgtacactcctgtatatattataaacactgtatgctcaggctacatgaaatttacaaaaaaaaatttacaaaaaaataaagtaattagggccaggtgcggtgggctcgtgcccgtaatcccaacactttgggaggccgagatgggcagatcgtaaggtcaggagttcgagaccagcctggccaacatggtgaaaccccgtatctactaaaaatacaaaaattagccgggcatggtggcacacgcctgtaatcccagctactcgggaggctgaggtgggaggacggcatgagcctgtgaggttggggttgtagtgagctgtgatcgtgccattgcactccagcctgggtgatggagtgagacttgtctcagaaaaaaaaaaaaaaaaaagaaatcgcatacagaaacacagaaagaagaccatatgacaacagaggcagagactggaattatgcatctatgaactgaggaacaccaagtatcgctggcagcaccagaaactaagaaaataccatggaacagattctcccctaaaaccttctgagggaacgtggtggctctgctgacaccttgatttcagtttggacttctggcctctagaactgtgagagaagaaatttctgttgttttaagccactgggtttgtgacattttgtaatggcaactctgggaactcaataccacccatatagagcctgtgttattaaaatgatgtaaatggatccccgtttccccacatccttgccagcacttgttatgatttgtcttttttttttttcttgtaagatggagtctcactctgtcacccaggctggagtgcagtggcatgacgtctgctcactgcaacctccacctcctgggtttaagcaattctcctgcctcagcctcctgagtagctgggactacaggtgtgcactactgcacccagctaatttttgtatttttagtagagatggggtttcaccatgttggtcagcctgcttctcctcttataaagacagcagtcattggatttaggacccaccctaattaagtttgatctcatcttaacttgattaccacctgcaaagaccctattttcatgtaaggccacatttgcaggtaccaggggttagaacttcaacaaacctcatttgtctttttgataatagctactctaggctgggcacagtgtctcacacctgtaatcccagcactttgggaggccaaggagggcagatcatttgaggtcaggaattcaagaccagcctgaccaacatagtgaaactaaatacaaaagttagctgggcatggtggcgtgtgcctgtaatttcagttactcgggaggctgaggcaggagaatcccttgaacccaggaggcagaggttgcagtgagctgagatcacaacactgcgctccagcttgggtgacagagtgagactccctctcaaaaacaaaacaaaaaacaaaaaacaaacaaacaaacaaaaagataatagctactctaacaggtgtgaggtgatagctaatggtggttttgatttgcatttccctgatgatgagtgatgttcagcattttattcatatacctgttggccacttgtatgtcttttcttttgggatatgtatgttcagatcctttgcacatttttattttttattttgagacagggtctcggtctccttctgtcgcccagggtggagtgcagtgatgcaatgtcagctcactgcaacctcctcctcccgggctcaagggatcgtcacatcttagcctcccgagtagctgtctttgcccatttttaattgggttgttttcttgctgttgagttgtttgagttccttatatattttggatattagctccttatcagatgtattgtttgcaaacgttttctcacattccttaggttgtctctttcctctgctgaacgcttcctttgctgtgcacaaattttttagtttgatacgatcccatttgtccattttggcttctgttgcctgtgcttttgaggtcctgtccaaaaaatcattcccgagaccaatgccatggagctttctccttatgttttcttggagcatctttaccatttcaggtctgacatttaagtcttttcagaacatctgcactcccacgttcacttcagcattattcacaatagccaaaatatggaagcaaactaagtgtcccacaatggatgaatggataaagaaaatgtggtatgtatacaaatagaatactatacagccctaaaagaaagaaattctgtaatgtgtgacaacagggacagaactggaggacattatactgagtaaaataagctggcacagaaagacaattacagtatgatctcacatgtgggagcttaaaactaaaaaaaattgatctcatagaaagagcaggaaggtggttcctggaggctgcaggggaggaggagggattgagaaggagaagatgttgatcaaagggtataagttgcagttagactggaggagtaagttttagtgatctattgcattgcattgcattgcatcgcatttagtgatgcattaatacattattgtgtatttatattgcattattaataaatagtaatgtgttgcatatttcaaaattgctaagagatttttaatgccttccccacacacaaaaaacggtgaggtggtgaggcgatggatgtgttaattagcatgactgaatcattctatgatgtatacatagattaaaacatcacactgcactccataaacatacacaattaccatttgtcagctgcaaataaattaataaaaaatcatgcctgtaatcccagaactttgggaagccagggcaggaggatcacttgaggccaggagtttgagaccagcctgggcaacatagccagaccccatctcaacaacaacatcaacaacaacaacaaattagctgggtgtggtggtgcctgtagtcccagctacttgggaggctaagctgggaggatcgcctgagcccaggagctccaggctgcagagagctatgatcatatcactgcactccagcctgagtgacagagcaagaacctgcctttaaaaacaaataaaatcatctaaatggggtctggttttcctaaaaaagcagagttacaatggcagcttccattcataatggatcaacttttttttgttttgttttcatatgctccacattttacttatttatcattgtgcttcttcttcgtcttcttcttcctcttcttcttcctcttccccttccccttcctcctcctcttcttcttccccttccccttcctcctcttcttcttccccttccccttcccattcctcctcctcctcctcttcttcttcttccttcttccttcttcttctttcctcctcttcttcttcttcttcttttttttttttttaatacaggccaggtacagtgtctcacacctgtaatcacaacactctgggaggccaaggtgggaggctcatttgaagccagggttttgagaccagcctgggcaacatagcgagaccgtgtctctatcaagtattagctgggcactgtggcatgcgcctgtagcctcaaatgatcctctcaccttggccttccaaaacattgggattataggcatgagccaccgcaccaggcctgtattattgcattctttacagaaataaataaaggctcactctatcacccaggctggagtgcagatcttggctcactgcaacctccatctcccaggttaagtgatgcctctgcctcccaagtagttgggattacaggcgcccgcctccatgcccagccgatttttgtatatttattagagacaaagtttcgccatgttggccaggctggtctcaaactcctggcctcaagcctgtcttggcatcccaaagtgctgggattacaggtgtgagccaccgtgcccagccatactgttatttttctttttaaagttattattcatttattttaaattgacagatacaggctgtatctatttatagtgcataacatgatattttgaccatatgtatacactatggagtggctcagttgagctagttaacatatgcattattacatatgcttatcacttttctcacggtgagaatgcttaaaacctactctctgagcaattttcaagtatataatacattgttattaatacagtcgccaggctgtacaaaatagatctcttgaacgtattcctgcagtctaaatgaaatttgatatcctgtcaggcgcggtggctaacacctgtaatcccagcactttcggaggctgaggtgggcagatcacttgaggtcaggagtttgagaccagcctggccaacatggtgaaaccccatctctactaacagtacaaaaattggcagggcgtggtggtgtgcacctgtagtcccagctacttggaggctgaggtgggagaatcgcttgaacctggaaggtggaggttgcagtgagccgagatcgcaccactgcactcccacctgggcgacagagtaagactccatctcaaaaaaaaagaaaaaaaagaaaaaaaaattgatatcctttcagcaacatggctcaacttttcatgtaaatgattcaagttccttatttcagcagtaagttcatcaattaggaatgaacctgctttatagtgcgtttatcaactgattcaacagcgcagtagaatcaccaattatataagactgcatgtgggccaggtgtggtggctcacgcctgtaatcccactgctttgggaggtggaggtaggaggattgtttgaggccaggagtttgagaccagcctaggcaacatattgagatcccatctctagtaaaaaatataaaaaacttagctgagtgtagcagtgtacacctatagtcccagctacttgggaggctgaggtgggaggatcacttgagtccaggggtttgaggctgcagtgagctatgcctgcaccactgcactccagcctgaacatcagagcaagacactgtctcaaaaaaaaaaaaaaaaggactgtgcatactgtggtataatgtgaacgtgaacgcaaataccacatagctcccaccttactttgaaatatgcattactgtattattacttttttttgtttttttttttgagatgaagtctctgtcacgcaggctggagtgcaggggcatgctgtggctcaccgcagccttgacctcctgggctcaggtgatccacctcagcctcacgagtagctgggactactggcgtgtgccacaatgcccagctaatatttgatagagacagggtctcactatgttgcctaggctggtctgaaactcctgacctcaaacgatcctcccacctcagcttcccaaaatgttgggattacaggcgtgagccaccacacccagcctgtattgttgcattctttacataaataaataaagctaaatgtgattccttgccagaatcctggaattccagagatctcttttggggtggtctagaaaaccactggctagattgggggctcctttctttgtctttttgagtaatcaggctgatgaggtgggttttggtggatttgcctgtagcaaacgtggctatgaaagaacaagccactggcctgggttttgggtctgtttagaaagctgcaatgtcacctgccttgttaacagaggcggaggctgcagtgagccgagatggcaccattgctctccagcctgggtgctagagcaagactccatctcagaaaaaaaaaaaaaaattaaaaaaattaaaaatatatatacatatatatgtatatgcagattttttatttttttgatggagtttcactcttgatgcccaggctggagggcaatggcgccatctcagctcactgcagcctccgcctcccgggttcaagtgattttgtgcctcagcctcctgagtagctgggattacaggctcacgccaccacacccagctaattgttgaatttttagtacagacacggtttcaccatgttggccaggctggtctcctactcctgaccttaagcgatctacccgcctcagcctcccaaagtgctgggattacaggcgtgagccaccgcgcccggccagcaaagtagatttttaagaatgtatgttattttatttttttaagagacaggttctcactctgttgcccacgttgcagtgcagtggcacaatcatagctcactgcaaccttgaattcctgggttcaagaaatcctcctgccttagcttcctaaatagatgggactataggtgtgtgccataatgcctggctaagtttttcaacattttgtttttcagagatggagccttgttatgttgcccaggctggtcttgaacggctgatcttaggagatcctcctgcactggcctcccaaagcagtgggattacaggcgtgaaccactgtacctcgtcataaaacagattttaaacaatggaggtaacgtaacacgtgagacagacataattgatcaaatactcaagacacctactgagcgctccaattcttgacatttgcttacaggaaattaaacagatgcacacacgagtggaagcagaatgagttctccattacaaagaaaagcgtgttttggctggaaattaaaaatgcaaatgaaaacaagctttaaggtttcattacaaacccacttaactgggaaaggaaattaaattggtaatattcgatggcctgggtggggaatccatgaacatatgcatacttggcaggtttataaatgggttccatgtttttgaaactcagaatggctctttgaataatgagttgaaaagctgttaatatctttgatcctataattatccccaaggaaatacgcccaaagggtggggggagtcattgtacgtaaatgtgcacagcagtgttcttcgtaagagaaattattggaaacaactcaaacaccctataatagagctatggctaaacaaaccatagtgtatccaccctacgagatatgtgatcgcaatggaaattatgcctaaactcagcaataaggttataaactaggggcgagcgataaaaggggaatacgaaatagtggatcagaaactatggatcagaaacacatggatgtactaacttccctccttccttcacttctctccctccttctcttcctcccttcctctttctcttgccatcctttcttcctctaaactgcggccacacagtttcccaagcagcctaaattccttctcccctcaatcttattccagtcttatttcctctgcctggatgctcttccttccattaaaaacaaaaacccattaaagaacaacaacaacaataacaatacattctcactttagaaggtcaaaatcaacatcatcacagccaatgaatcaataggacagaggagtgagaagggaaagaataaatgttccctcctccctcgaactctggcccttgtggtggcaaaggtctgagccctgcctctcacactgttccttctgctatcaccaccacagtgatctcctacccatccttcagttcccagcttaaccgtcacttcctccaggtagccttccctgactgctccccatccttctagagcaagctaagcccagagcctctccctgaagtgccattaccattacaggtttatttgtgtaattctctgtttaatttctatttcctgcactggactgtgagctccatgtaggtagggatttggtttgtgtcttttttttttttttttttttgagacaggatcttgctctgttgcccaggctggagggcagtgatgagatctcagctcactgcaacctctgcttcccaggttcaagtgatgctcccgcctcagcctccagagtagctggaactacaggctaatttttttcgtatttttagtagagccagggtttcaccatgttggccaggctggtctcgaactcccgacatcaggtgatccgctcatctcagcttcccaaagtgttgggattacaggcgtgagccactgtgcctggctcagtttgtgtctttttttttttttctgtgcccaggctggagtgcagtaacacaataatggcttattgcagcctccacttcccaggctcaagtgatcctcccagctcagcctcgtgactgccttgtcttgtttgcaaccaagcacctaatataagcaggtcccccatgaatacttcccgaatgagtcacaaacattcaccaacttgactgggagcttcgtccctgccaggtgctggtttgccatgcttcatggggatcatttagttgaattcccacaaaataatgagaagctaggcacggatgttattcccataatgatgtaatctgcccaggacacacgcacaggtgggaaagggtggagctgagacccaaatccaggcagcacggtttgcaagccctctgcccccaccccaccatgtctcttgggcgataggtgatgaacaactgataggtggcagaggaagggactcacccacagaggctatatcagccagctgatcctcagcctcttcggggttgagcaaatctgtcttgcttttctttatggtggttctccgcagagctccaacaatggaaacatggcaagagaaaaagacgttaccctttttgcaacacagaccatatggacacagtgtgtccttggatttaactctcacggcaactgttctcacgggaactaatagtatacccatttttcagatgtgtaaactgaggttcaaggtggcactatcactttgcttaaaggggtaaagacaagaatcaagtcgggttcagtccgactccaggtctgggccctcagccactattttccttctggtttatttatttatttgtttatttattttgagacagaatcttgctctgtcacccagagagtggtgtgatcttggcttactgcaacctctgcctcctgagttcaagcgattctcctccctcagcctcctgagtagctgagactacaggcatgcaccaccacgcctggctaatttttgtattattagtagagatggggttttgccatgttggccaggctggtcaaactcttgacctcaagtgatttgcctgccttggcctccaaaagtgctaggattacaggcgtgagccgccccactcagcctctatttttaaattctaagaaacctcactttcttatgaaaacagtccaccccttgacctgtagcatactcgctaggcaggctgcaattttgggattctgcccccatattcaagctatacaccccaggggctccacagcagacaagttcaggtgtagacttccaataaaaagatttaggtaccctaaatgagttagattacctaactcatttaggggagttaggtaatctcccctccccaactaagataataaaattcattttataaccttctgggacgcagtgccagttcttttatttccctcaaatctctcagatttttaatcaaaagtcatcaccctgtctaaccagctttctttcttttttttgagacagagtcttgctctgtcgcctaggctggagtgcagtggtgtgatctcggctcaccgcaacttccgtctcccaggttcaagcaattctcgtagtttagcctcctgagtagctgggattacaggcgtgtgccatgacacctagctaatttttgtatttttagtagagatggggtttcgccatgatggccaggccggtcttgaactcctggcctcaagtgatccacccgccttggcctcccaaagtgctgggattacaggcatgagccaccacgcccagcccctgtctaaccagttttctaaagtatgagaagataaatctcaagcaagaagttgcatttttcagggagtactattatttttcttattgctgttattattatattgcagacatattattctggcctatctctaaattctttttttttcttttgaaacagggtctcactctgtcacccaggctggagtggagtggtgcccactgcaacctcgacctcttgggctcaagtgatcctcccacctcagcctcctgagtagctgggaccataggtgcgtgtgcccccacatctggctaagtttattttttgtagagacggaacctcattatgttgcccaggctggtcttgaactcccaggctcaagtgttcctcctgtcttggcctcccaaagtgttgggattacagatgtgagccacagacagaccgcatccaaccctatctctaaattctaggaaactttactttcatgaagcctcaggttggatacacagtgactcttacagtctgtcccctgactcccagctatgctggggaggttgggcttttggacacctttttaatggtccctcctttcatattcaggtttccaggggaccatgaattgacatctacactcccagcattttgggaggccaaggtgtgcagatcatttgaggcaaggagttcaagaccagcccggccaacatggcgaaaccccatctctatcaacaatataaaaattagccaggcatggtggctcatgcttgtaatctcagcttctcatgaggctgaggcagagaattgcttgaacctgggagccagaggttgcagtgaggtgagatcgtgtgactgcactccagcctgggtgacagagcgagactctgtctcaattaaaaaaaaaagaaaagaaagaaagtcatggttctgtctcgttaagtttctaacatgggagacagcagccgttcacagtaaactggattattggtggaattattacttatttagcaaacagaaacgtgctgaccccatgccaggcactatcccaggtgttctatttgccataacgaatatcattctgagaaacaatctcgtgagctagggtattgtttatatcatacccattttgcagatgagaaaaaccaaggcacaaagcagaaaaaaccaggtccatggttaaaacaaaaaagtggaggccagaatagggaaactctgcatggaagtcctaaaattcctccaagaggaacgtctaccctctgcaagatccttagaaccagtcacctgctctcccccgactccccaccacagcttctcccttctcccctgggacccacccctgaggtgggtttagagcagttaccatcaaagggatgcctctgctccccgtcagtttcatcctcggcgaggatcacctcttctgaagaggaagagcacagagttaagctcctgcatttggaggatgagttctcccttggaccaggaagaagggtctgcccggccacccccattctctgctgactgatggtgacagctcaaccgaccaaaaaacatgctgctgggtggtttgtgacttcaagccccacctccgcaacagtagcaatagccaacattctccccacctcgcgcaaaataaaaaccaatgtccacaccacagcctataagcccctgcttgatctgatctccatcaccttcctgtcttcctctcctccagctgtccccacctctcactctgtttcagctgcactggcttccttgctgtgtctcaaatacgttcctagctcagggcctttgcacttgctgtctctgcctggaatgccccttcccttgacatccccacagcttccttcttcacgtccttcaggtctctctgctcagagggtacttccttagagaagccttccctgaccaccctgcctctaacttcctactcttttttttttctctgacacagagtctcactctgttgcccaggctggagtgcagtggtgcgacctcagctcactgtaacctctgcctcctgggttcaagcaattctcctgcctcagcctcccgagtagctgggattacaggcgtgcgccaccatgcctggctaatttttgtatttttagtagagacagggtttcaccatgttggccaggctggtctcgaatgcctgacctcaggaaatctgcccgccttagcctcccaaagtgctgggattacaggcgtgagccaccgcgcccggccaacttcctactctgttttatcttcctagtctgttttatcttccttctctgaatttgggagttcccaacatgacatgtatttgtttgctttatctctctcattagaatatcagagctctgagggcagggatttggtgtgtattgtttactcccatatcctcagtgcttagatcagtgcctggcacacagcaggtgctccctaaatgtttgttaaatggctgaacaaataaatatgtgcctaccgtgtatcaggcacttctctccccaagtgactcagctgagattattttactaaatactccaatagtactatgacttaggcactaccatcgcctccatgtaacagctgaggaaacggaggtacagggatgtgtggtgcatgggtaaaaagtggcagggccgggatgtaaaccagcgtctgatttcagaattcaagttacgtgatgtcagatcctggcttcatcttagacttcttcatatcagactctggattcttgttgataaaatttgggactaccaattcaggttctctttctcctcccatcataaccctcccagcttagccttctccaaactgcatgactctctttgtactccgtggcctgggatctccatccctgggccccaggatgaaagggcctcacctgcttttgagatccactccatgtacccattgagctcacgttcaatctgttgttgccgcctcagcttcagaaaagcccgccggttctccacccgttccctttctttggcaaactccctggagaagcatagaaaagccagagtatggctgttttgaaaatgttaggaaacgtttgtgtgtgtgtttgtgtgtgtgtgtgtgtgtgtgtgtgtgtgtttgtgtgtgtgtgtgtgtttggggattcagaagtccctggaggtcaggagttttcaacaggaggagtcaggacttctgggaaaagactgggatattatagtgatgggtgcttctgccagcttcacacatttcccgacaactgtgcctaggtaaagaaaaaggccaggcacagtggctcatgtctgtaatcccagcactttgtgaggctgagatgggagtatcatttaaggccaggaatttgagaccagcctggacaacacagtgggccccatctctatgaaaaataaaaaatgtagctgggcatggtggcatacacttgttgccttagctactcaggaggctgaggcaggaggatcgcttgtgcctaggagttctaggttacagtgagctatgatcgccccctacactccagtctgggtaataaagctagacaccgtctcaaaaaaaaacaataaaaaagaaaaaaaccgaaaggataaaaccatgccatgccaaccaccactggctgcatacctcattctcattctcttcatacttttggctaataattatttcagccctcttttaagttagaccaataagccatgaatgaaagatttctgcagcaggttggcttctctgccataggtcccacctcttcctgtttcccttcttccttttcctgtttggaacatgaagtggccatccggagggcgtgaggcagccatcttaagaccatgaggtatccacgagattggaagcctctggtaaagatgtcagaatggaaagctggaagaatctggggttgctgatggtgccatagagccaccatacaagtgcccagacttcttatggtaagaaaaatgaagcccatttatgattaagccaaaaaaatcttggggatagaggacaatatgggtcaggaaaatacaccgttagagcatatgctatgattttatatttggaaaatgggggagaagtaaacccaaactattggtttttaaaaaaaatgtaaagaaagtaaagcccatatgaaccctctcactgggtacccctagcagtacacaacctctgcacctgtgcatggcttgctaataacagtctggtaacccaaacaagggaagaagccttttctctgtctagtgaatgaaaacaaagcttcaatggcctctacttggaaagaagttagcaaagaggagtgagtgggatggggtggggagtagcagaaacttaccctgacagcacacccagcacaaggttcagcataaaaaaggagccgatgatgatgagggggatgaagtacaaccagttccaagtgttccctgaggcatcgttgctctgtagggtgtgaggagggaaagcaggtgagagttgactgggactcagatagaacctgacaggtgagggaaggggaagctcggttctcttgtggctctgtcttaaatgttcttggcttgtggagttctggggctctggcatcccagagggggaaatggaggaacgttttctgaagaaaacatccaaagggtaaagctctctcttaattatgttctcctcacataacataattgacctgggaatggagtaagaaacacaagaggacttcccagaccacagtccagaaggagaaggaaaaagtaaaccaaacaaaacacaaaacctattgaaatggattaattaatccctggttccttctcttctcccaacacagtcatagactccccttagaggagatgcatgaccacagagtctgatggcctggtgaaatcaccaagccagacagatggtccatgagccctttcctcaagtgtctccctgctccattccctgcagccttaatgccaatcacaaaaaattctcagaagtttcagctcaattttcaagaggaaaaaagtccacaaatagaatactctctgaaacagaaaatagaacactatagcaagaaggaagtaagatgaggggaagaaaatcaaggagaggaggttggggggtggagagagaaagagagacagagagagagagggagagagagagagagagagagagagagagagagagagagagagagaaaagaatgataaaagccagcacttacagagtatttatggtgtgctggcaccttcctaagcacattatgtatgttagctcacttagtcatttaatcctcatgatgcctctatgttataatgcccatgttactattgaggaaactgaggcttagaaagacaaaatcatcagcccaagatcacagagttattcactagtggacatgggatttgcactaaccacctggccccagagtccatgggcttaacctctgtgctgggaagccttgcctccagctgtcagggcaggggtagcctttgaatagttgatcaccctgtgacacctgcagaatgcagggctctcaagtgtggctttaaaagcccacctttaaaagcatgtatgacactgctgctgcctggaagaaaggctaaaatgagaaagaagttaagatgaggtcattactaccaggtgtctgtgaagctgtggagcaactggaaccctcataatctgccaatgggagggcaccatgctgtattcatctcctgtggctgctgtaacaaggaaccacaacctaggtggcttaaacaacaaagatttattgtcttacagttatagaggccaaaaatccaagctcaaggtgtcagaagggctggttccttctgagagctgtgagacagaatctgttttatgcctctctcctagcttctggcggtttgctggcaatctttgctgattcttggcttgtagaggcatcatcctgagctctgcctttgtttaaacatggcattcttcctgtgagtgtgcctgtctctgtgccaaaatctcccctttttatatggacaccatcgtattagattaggacccaccctaatgatctcatcttaactgctatggttggtgcaaaaataacggcagttttgccaatggcaaaacctttacatgtgcaatgaatctatttccaaataaggtcacattctgaggtactgggggttaggacttcaacatatgaattttggggtgagacaataaaacccataacacatggtacaactacttgaaaaattggttgagagtttctatgctaaaattaagtcatgcttaacaatgggcatacattctgaaaaatgtgtcactaggtcattttgttgtgcaaacatcatggagtgtacttacacaaacctagatggtatagcctactacacacctaggctgcatggtctcgcctattgctcctaggctacaaacccatacagcatgttattctatggaatactgtaggcaattgtaactctatagtgtatctaaaaatatctaaaaacaggccgggtgcggtggctcacgcctgcaatcccagcactttgggaggccgaggcgggcagatcatgaggtcaggagatcgaggccatcctggctaacatggtgaaaccccgtctctactaaaaatacaaaaaaaattagccgggcctggtgacgggcgcctgtagctacctgggaggctgaggcaggagaatggcgtgaacccagaaggcggagcttgcagtgagcggagatcacaccactgcactccagcctgggcaacagagcgagacttcgtctcaaaaaaaaaagaatctaaaaacagaaaagctatagtaaaaatactgtatgataatcactgttatgtattcggtccattatgggaccactgttacatatttgatctgttgttgaccaaaatgccattgtgcagtgtataactgtatgtacctttgccaacacccagtaattcttggatagttactgatccaagatcactacaattagatagtaattccgaaatagtaattctgaataattacacaacagaaagcacacacaagaacattcatagcaatggtattcatcatagctccaaattgcaaacaatccacactgttatcaataggagagagaggatacatgcaatgaacaatgccacaggtcacatgagatcttaaaaagttaacgtcaagcaaaagaagccagacttcatttatgcaaaatacaaaacaggctaaactggtgaatgatgctcaaagtcctggtaggggtacccttgcggggaggtagtgactaggaacaggatatgaggggggcttctggggctgagaagtttctgtttcctcatttgtgtgctggttacatggatgtgtttagtttgtgacaattaatcaagctcttcacttataatccgcggatttttctgtatgtttattctacttcaattcttaaaaagttgtttttttttgagacggagtcttactctgttgccgaggctggagtgcagtggcatgatctcagctcactgcaacctctgcctcccgggttcaagcaattctcttgcctcagcctcctgagtagttgggattacaggcgcccgccaccatgcctggctaatttttgtatttttagtagagatggggtttcaccatgttggtcaggctggtcttgaactcctcacctcctgatctgcctgccttggcctcccaaagtgctgtaattacaggcgtgagccactgagcccggcagaagtttttttttaatagtcaactttaccttaaaaagaaagaaaatgctgatacgtgctgcaacatgggtgaaccttgagggcattatgctatgtgaaataaaccagtcataaaagggaaaatcctgtatgattccatttataggaggtccctagagtcgtcagatttataaaaacagaaagtagcatggtgggtgccaagggctgggggagggggaacagggagttcgcgtttagtggggacagagttacatttggaagatggaaaagtttgggagatggatggtggtgacagttgcacaacaatgtgaatgtattatacttaatttcacgaaactgtatccttaaaaatggttaggatgacaacaatatattaatggtttcaaatagctagaaggaggagcttgaatgttcctaacagaaagaaacaataaaggtctgagaagatggatatgctaattaccctgatctgagcactacgcattatatgcattgaaacgtcactatgtaccccatgaataagtacaattacttgtcaattaaaaaatgttacaaagttaaaaaaaatattaggatggtaaattttatgtcatgtgtgttttgccatggattaaaaaaaaaaaaaagcactgaaaataaaactaacaaagtcagctttaatcatggacacagacaggttctggggacaatgaatgtgccagccaccagcccacatccttgttttaacgagctcagaaatgccaatgctttgcttctggaaggttctggaagaaagaaccgagtcagcggaacattgctggacagaaggcagcactggctttgtgctcctctctccatcactttggcggctgagggttctcgttcccatttctcagggctaaatatagcccagggaacgaaactctgcaccggccgccagtagggagactctgagccatcacgaggagcaggctcagatgacagggacagggtggaggatgggggagagggacaggactgaaagggaaaaacagccgaggcccttccataccaaggcagcccgtccatctcaggtgctgccaacaagacccgaatctgcccttgcctgggtcctcgacaagcttgggaacctctggccacaggacatgctacccagcaccacaacagacacacgtggaggcttggactgtttgagctcatttaatcctctcatgaaccccaggagtgggtatataattatccccatcctcccgggtgagaaagctgaggcacagagaggtctattttttttttttttttttttgagatggagtctcactctgtcacccaggctggagtgcaatggcactatcttggctcactgcaacctctacatcctgggttcaagcaattctcctgcctcaccctcccaagtagttgggattacaggtgcttgctaccatgcccagctaatttttctatttttagtagaggcggggtttgaccatgttggccaggctggtctcgaactcccgacctcaggcgatccactcacctcggcctcccaaagtgctgggattacaggtgtgagccatcacgcctggccgagaggtcaagttacatgcccacagttctgttgtgggttgcagtgggtctctccaaaaagatgcattgaagaagtcctaatccctggtacctatgaattggaaatagggtctttgcagatggaatcaagttaagatcaggtcattagggtggaacctcatcctaaatgacgggtttccttataaaaagaggacatctgggcagagcacagtggctcacatctgcagtcccagctactcaggaggctgaggtaggaggattgcttgaggccaggagtttgaggctgtagtgagctatgatcgcaccactgcactccagcctgggagacagagcaagaccctgtgtctaaaataaagaaacaaacaaacaaataagtaaataataagaaaaggagaaacctgggcacagagacaaccttgcacagagggagaaggccatgtgaaatggagatgaaggcgggatcagggtgatacgtctacaagacaaggaccaccaagcactgttggcaaaccaccagaagctaggagggaggcaagaagggatttcagaccaagtctcaggaggcaccatggcccagctgacatcttgatggtctgtggcccagctgaccttgatggtctgtggactcctggcctcctgaactgcgagagaataaataaatttctgttgttttcagctactctatttgtggttctttgtggttcaagctacaggaaataaatgaagttactcagttactgaatggcagagggggcctccaaccctcccatctccttgcttttatctcctccccttttccctcgctcattcggttccagccacctggcttccttgcagtttctcaaccacgccaagcacagtcctacctcggcccttgcacaggctgtccctccctgcctggaatgctctttcctgagattgctacatggtttcccctcacctccttcaggttttttactcaaatgccaccttctgagggaggcctcccctgatggccctttacaattgcacccctcatttctggtccccattgtttcttttttcccatttgcatttcaccgcctatatactttacttatttctcttgttctctcgtcttcctggctggaatgtccattcgacaagagggaggggctttgtcctttttgttccctgctgtattcctgtattcccagccccctaggacaacatctggcacacagtcggtgctcaataagtggtgtctgttgaatgactgattgagaggtgtgtccaagttccctgcatagctcagatcgtcaaccccaagccaagctccctcctgaactctcatctgcaccatcctctctggggagtgggcttctgctgcctgattttagagacactttttctcttccaaactcatccaattattcaattccatactctggaatcaacaattcccagggaagaaggtggtggaaggctgggtgcagttttggattaggagatgagctttccctggtttgggggtgggggtgggtggatttcgttcaggagcaaaatgaaaagtacattttacaagcacaaggactggagatgccatggctgttctgtggtagttcatcagcaaagatggggtcacagatctcttctcctggttctcatctcttctttggcagttcaagttaagggagggatatgcacaagtctgaattcgggaaggagagtgggggaggatggcttgctcatttgttaaattcattaatattgggaaggatgtgctctagagatcgccttgtctttcttccaagggctcaaagacttccactgcctggaacactgttccccattaatgctgccatcaaatatttccagcaatatggtgggatggtccttcctgagtccctttggggttggctgaggaccacatgctaagtgctggccaatgaggagtgagtggaaatagctgtcattttggagccagagcattgaactttcagtgtgggaccttctagcattccttttttccttctggaatagcaagtggcaatgttctaggtgattagctaggtctcaagtgactgcactgaacagagcccccttcttccccactgccaacctgcactggacatgtagcatgagcaggaaatacatctgttgtcaaaagtcatggaggctttggggatgtttgttactgcagcataacttggctgccctgaccaatacatctttttaattaaatttttatattttgtagagagggggtctctgttgcccaggctggtctcgaactcctgggctcaagtgatcctcctgcttcagcctcccaaagtgctgggatttcaggcatgagccaccacgcccagccagattgatacagtttgatatctctgtagcttgctccttcacctctttctggtctttctttcttttttttctttctttttttttttgagatggggtcttgctctgttgcccaggctggagtgcaatggtgtgatctcagctcactgcaacctccacctcctgggtccaagtgattctctgcctcagcctccagagtagctgggattacaggtgcccgccaccacacctagctaatttttgtattttttaaaatagagacaagatttcaccttgttggtcaggctggtcttgaactcctgacctcaggtgatccacccacttcagcctcccaaagtgctgggattacaggcatgagccactgcacccagcctccttctggtctttcttaaatgccaacttctgattgactcttttatggatcccatgaggcaggtgagaaagtgtctgtctcttgcatgtctgatggagaacatacattcttctcatcagcacatggacattctccaagacagaccacatgttaggccacaaaacaactctcaacaaattttaaaatactggaattctgtcaagcatcttctcagactaccgtgggataaaactagaaatcaataccaagaagaatttcagaaatgatgcaaatatatggatattacgcaacatgctcctgaacaaccattgggtcaatgcagaaattaagatggagacttaaaaaattttggaaatgaatgaaaatagagacacaacacaccaacacctgtgagatgcagcagaagcagtgctgagggaagtttacacttgaccttagctaaagggccaagaagcaactaagagggaagtttatagcatcaaatacctacatcacaaaaaacagaggccagatgtggtggctcacgcctctcatcccagcactttggggggctaaggcaggaggatcgcttgagctaggggtttgagaccagcctgggcaacacagtgagaccccatctctaaaaaataaaaataaaaaaattagctgggtgtggtgctgtgcaccagtagtcccagctactggggatgctgaagtgggaggttcacttgagcctaggaggcagaggttgcagtgagtcaagatcatgctgctgtactccagcctgggcaccacagtgagactctgtctcaaaaaagcaaaaaaaaaaaaaaaaaattacaaattaagaacccaacacgtacctcaaggagccagaaaagcaagaacaaaccaaacccaaagttagcagaagaaaagaaaggtcaagttcaagatcacaatcagccaattatttccattctctgaacctatgcctggagcaactctgcctttaggtcttggcttggccaatttcttcttatcactcaaccttagatccattgtgcccccatcagagaagccttcttggacctctcaatcaaaaggacttgccccttcctgcagctcagccagacatctcattctcttcccagcacgttccactgtctgaatcatcttgtcaacttatgcatttcaagattgtcatcttgatcatcagctcctccagggtagagatttttcctgtctaaatcccagtgtccagatcagcaccagggacatagtaggtgctcactaagcattagttgcatagtcaatacaaatgttcctggggttcctgttggtggatcatttattttatttatttatttatttatttatttatttatttagggacagaatctcactctgtcgcccagactggagtgtgatggcacgatctaggctcactgcaacctctgcctcccaggttcaagtgattcttgtgcctcggcctcccaagtagctgggattacaggcacgcaccaccacgctcagctaatttttttgtatttttttagtaaagatggggtttcgccatgttggccaggctggtcttgaactcctgggctcaagcaatccgccctcctcagcctcccaaagagttgggattacaggggtgagccaccatgcccagcttggtggatcatttaaataataaacacaggaaatgtgtttatcccaaatccaaatgattaagctatttttctgggaaaggagaggcagaaggcagaattatggtcgcattagccaagtctttttgggctgatgaaatactccccacatcttcctcgattcccgccatctctgtgcctggtggatggagaaactgaagctgagagaggcaacatgatgtgcctggatcacacagggtgcagatggcatgggtgggactagacccgtcattctggcctttacaaccaactgattttttcccacttcaccccttctccgtacttgcatagtattttaagtaaataacaatgggcccaagagagcttcaagggtgagggatgttactgattcatcccagtatcgctggtggtgcctggtgcttagaaagcgctccataaatactcatcaaacaaactaatggctgagtcccagcaaaatccttcagtgccttctgttttatggtttattttcctctaatttttttgagcatggttcattgagaaaaagtatacaggatgttaaaaaaacaaaaacaaaacaaaacaaaaggaaaaaaccccaaaactcagctcaggagaacacccgtttctccagtatatgggataaacatgggggtggatttgagtgtgaaaaagctgaagtctgacagtgaccgtgagagaggctgtgtgtcccactttatacccgttatagatcatgccaggcctgctaattattttttcagtgctctttttcccctttcactctcaaaactgtcctggtttggatcataaattatataggctgtctgttcacgaagtctttttttttttttttttttttttgagacagagtctcgctctgtcacctaggctggagtgcagtggggtgatctcaactcactgcaacctccatctcctgggttcaagcgattctcgagtctcagtctcccaagtagctgagagtacacgcgtgcatgaccacgcctggctaacttttttgtattttttagtagagacggggtttcgccatgttggccaggctggtctggaactcttgaccttgtgatccacccgccttggcctcccaaagtgctgggattacaggcgggagccaccatgcctggctgatccatgaagtattttatcatcttccttcatcagctccttccttcatcctcactcactccccactggacatctgggcagctacatgtcctcacaaatgccaggaacatcctgcctcaggacctttgcactggctgttccatctacctcggctgctgttccctgagatatctccatggctcccttcatctccttcatgtctttcaaaaagcctcaagcaattgctggcctcaaactatcctctcctgcctcagcctcccaaagtgctgggattacaagtgtgagccatcacacccagccagggacatacattaatgatcactaactaaacatagttttgttgctttattaattgacattcaccaagggagagaaggagagaaatgtttatttattaaggaaaatttttaattgattatatatatatatatatatatatatatatatatatatatatatatatatatttttttttttttttttttttttttttttttgagacagagtcttgctctgttgtccaggctggagtgcagtggcacgatctcggctaactgtaacctctgtctcctgggttcaagcaattcttgtgcctcagcctcccaagtagctgggactacaggcgcctgccaccatgcccagctaattttttgtattttagtagagacggggtttcaccatgtagcctagggtggtcttgcactcctgagctcaggcaatctgcctgccttggcctcccaatgtgctaggattacaggcatgagccaccgtgccaggctgatagatgtatatattttttggatacatgtgatactttaatgcattcatatgatttgttccttcaggtctgttttttttgtttttttgttttttttttttgagacagttcttgctctgtcatccgggctggagtgcagtggcatgatcggctcactgcagccccaacctcccaggctcaagcagtcctcccatctcagcctctcaagtagctgggcctacaggcatgctccaccatgtccagctaatttttaaatttttttttttgtagagatggggtctcactatgtgcctaggctggtcttaaactctagggctcaagggatcctcctgcctcagcctcccaaagtgttagaattatagatcataatggccacggtgcccggccattcggggtgtataagaagaactgcaacctctcatcttgacaatgcacaaactctctactgttttattctatcccggacctctcaccaccctctaacactatctctaaggcagtgatccacaaactacagcccgcgggccagccacctgtttttataggttaacgtttaattggcccacagccatgctcattcacttacgcgctttatctgtcgttactttcacgctacaggagcagattgagtcgttgcgatggagaccatctggcccacaaagcctaaactatttaatgtctgctgtctgccctttttatcccaactgatcactggctttccccaccaacacgtcaactcctctgtgtccagaagagtgtctgcatacagtaggcattcaatgatggttgttgaatgaaccagtgatttatagtccaaagtctaatgctttgattttggtcaagacaaacatctatgaatgaaaaagggcatgggtcaaaggtgattccaaacattagcaaccactggccaggggacacgcatttatttatttatttatttttaattattaggttttttttgagacagggtctggttctgtcacccaggctggagtgcaggggtgtaatcacagctcggtgcagcttcaaacccttgggctcaggcaatcctccttcctcagcctcccgagtagctgggactacaggtacacaccaccatgcccagctaattaattatttttcttttttaaagatggggtcttgctttttgaccaggctggttttgaactcccggtctcaagcaatcttcctgcctcagcttctcaaagggctgggattccaggcgtgagccaccacgcctggccagggacatgcatttatgatcacaaattaaacgcagtttttctgcttttctaattgacattcaccaaaggagagaaatagagaagaagagaaactcacagagaaaagcacaaagaagggtgaggagaagggagagaaggagaaggaggtggagaaagagaaggaagagagagagagaacacaagaataaaagagacaaaggctgggcatggtggctcatgcctgtaataccagcactttgggaggccaaggcaggcagatcacttgaggtcaggagctcgagaccagcccggccaacatgttgaaacccagtctctgttaaaaatacaaaaaattggcaggcacagtggctcacgcctgtaatcccggcactttgggaggccaaggcgggcgaatcatgagctcaggagatcgagaccatcctggccaacatggtgaaaccccgtctttactaaaatacaaaaaattagctgggcgtgttggtgcatgcctgtagtcccagctactcaggaggctgaggcaggggaatcacttgaacctgggagtcagaggctgcagtgagccgagatcacgccactgtactccagcctggcgacagagcaagactccatctcaaaacaaaacaaaaccccccaaaattagctgggtgtggtggcacgcacctgtaatcccagctacttgggaggttgaggcacaagaatcgcttgaacccaggagatggaggttgtagtgagccgagattgcgccactgcactctagcctgggtgacagagtgagacgctgtctcaaaaaaaaaaaaaaaaaaaaagagagacaaagagagagagggaaaaagaaagagtcagagagagacggatgaagggtgatgaattgtgtccagagctgtgtgtgaaccctggctttgtcactcttggctaggggaccttggcaggtcacgtcaccctgtgggcctccgtttcctcatctggaagatggggttaaaaatatctttcctcacagggctgttttacggatcaagacacaatgtaaagctgatgccaggcacacagaagccctcggctaaaggcagccccaaattaactcaagacaccctggtcctgccaggtccccagcccctccacatcccctccttgggggcaaccaagagagggtaggtcctgtaccccatgaagtgaccccaatttgccttggcccagctggcaaagagggggtcagggaccttcccctgtgagagtggagacaatttctggcttttctgagccacatggggcacatagggtgagggggtccctgtgaaatgaggccacctgtcactagaacaacacagagccaccagctcttgtctccagcaaacagttttgttgcagtactcatggggttccccattctatccccttgagctcagagaagcagccctcaatcctatttgctgtgggaggctataaatggcagaatctgaggatgttgacactgagtgagacagagctgaattctgactctcaatcgctgtgcacagctctgggactcagtttcttcatctgtaaaatggggatattaaaggccctagctcagagagttttatatttttaccatcaaggaatcccaggctgatgcctagggaagtagccaaaacagggtggcacagaggaagtggctgatcacccatcttgattccacaaggctacccagagccttctctggcccaggaaggtccagggaagaggcccgtctagtgggcatgggagccatgtggataccttggagcttccaggtcaagaacagagatgggctatgttgatggaggtttgttttgtagcagttagaagtgagttggacctcacttttggcacagaatttccagtaaacctgcatttgtagtccttgggtatggacagaaactcacgccatcccaaagctcttagggggtaggttcatcttgaggcccagccagtaccccaatcctccttcctctgagaggcctggcctcctagagcagagcctctcaacctcagtactactgacattttgggctgggtaactggttgtgatgggggctgagccagacacggatggtgagaactccagttacctgctaaactatcacctcttctgaggggttttctagccacagtgactgcggaaggcactggcaagattctctcagtttcaccttggggaggaaacacttaggggtctgtggacagaattcaaggagttcgtgaatttagatagaaaataattacccctttacttcctcttactttcactggaagtggaacattttcttccatgatgattggaggtggcaaaccgcagaatcagtgacccccattaccaacagaaatcacatatagttcacagatatcatgcaaagtcttttaagcttaatactcccatgaaatcccaagacttatccaacccatcgctgggacttgttgttgatgtgttatgaagaatcacatctcttaaacgacatcacaactccttaaaaaaaaattctgggctggtcacagtggctcatgcctataatcccagtgactctggaggctggggtgggaggatcactagaggccagtagctcgaggacagcgtgggcaatgtgtgagaacatgtctctaccaaaaaaatacaattagctgggcatgatggtatgtgcttacagccctagctattcaggaggttgaggtgggaggatcgcttgagaccaggagtttgagctgcagtgagctatgattgcatcatcgcactccagcttagaagacagagcaaaaccccaaaaaactgggattaggagtttttgggaagaacgctatataggcataaaatcaagggttacataatatccacatccctgggggatactaatcttcatcatttggttaaagtggtatctatctgttcctccgctataaaacttctattttcccctttacctactctattcttcggaaatgagtcactaaatccagcccactctcaaagtaggggagattagtctccacctcctggggcagtggggagtgaagtttacatactttaaatggaattcttttgtaagaaagatttgcctgtttttcatttatcttgtgtatttaataataaaataaaaatgatcatttatttacttatgtgtttatttaagagatggggtcttgctgttgcccaggctggagtgcagtggcgggatcatagctcactgcagccttgaactgctgggctcaagcaatcctcctgcctcagcctcccaagtagctggaactacagacatggaccaccacacccggctaattaaaaaacattttttttgagatgtagttttgctcttgttgcccaggctggagtgtaatggcgtgatctcagctcactgcaacctctgtttcccaggttcatatgattcttctgcctcagcctcctgcgtagctgggactacaggcgtgtgccaccacgcctggctaatttttgtatttttagtagagacggggtttcaccctgttggccaggctggtctcgaattcctgacctcgtgatccacccgcctcggcctcccaaagtgctgggattacaggcgtgagccaccgcatctggctaattaaaaaaaaaaatttttttaagatgagtcttgctgtgtttcccaggctggtcttgaactccttgtctcaaacaatcctcccacctcagcttcctaagtagctgggattacagatgtgagccaccaaggctggccatttattattgatgtatcaatcaatcaatcaatgatttattttagtgtgactctctcgacagattatgtaagataaggacacctaggacactgtttgcctaagaaaggttcattctcctccctttctccctgcctcctggtctaggaatgacccgagaccttcttctttctccccgctaaccatttagcaagacaagtttaattggctcaagccaatttgggaggctgaggttggtggatcacttgaacttacgagttcgagaccagcctggccaacatgatgaaaccccatttttactaaaaatacaaaaaattagctgaccatgctggtgcatgcctatagtcccagctacttgggaggaagaggtaggagaattgcttgaaccccagaggtgagccaagtgagccaagatcgcaccactgcactccagcctgggcaacagagtgagactccatctcaaaaaaaaaaaaaaaaagtaaactgtgatcatcatagagaaatttgaagatacaaagaagtattgagaatatcaagattcccaaatcccaccacccgaaggtcagcttggtacagtgtcctccagtttttctttacttatattttcatatttgtacctttgagatcataaggtttacctccccttgattcctttttaaaaactcattttcccctcttatcatttcttcttttctagacagggtgagctgccactgttctccatgctgggaatgctgtttccaaaacatctgcctggcttcctccttctctgctcaaacatcacctcctcttaggaaccctccctgattggctgacctagactagggaaccatgcatcacttcttctctcgtgcagctttcgctctgttgcccaggctggagtgcagtggcatgatcacagctcactgcaacctccacctcctgggctcaatcgattttcctgcctcagcctcccaagtagctgggattacaggcgcccgccaccatgcctggctaatttttgtatttttagtagagatgaggtttcgccatgttggccaggctggtctcaaactcctgacctcaggtgatctgcctgccttggcctcccaaagtgctgggattataggtgtgagccaccatgcctggcctccttgatccctgtttaaaaacttgtttctcccactcatcattttttttgttttgttttttgacagggtttcactctgttgcccaggctggagtgcagtggcgtgatcacggcttattgccacctctgactccagggctcaagtgatcctatcctcctgtctcagcctcctgagtagctgggactacagatgtacgccactatgcctggctgatttttgtatttttgtttttttttttttgtagagattgggtttcactgtgttgcccaggctggcctcaaactcttgggctcaagtgatccacccatctcagactcccaaattgctggaattacaggcatgaaccactgcgcccagcacccccactcatcattatatggtgagcctttcccctgtatccttaatattctcccagcagacgatttttaatgatgacataatatgccatcatacggaaggaccatacggtatttaactgatctcctattgtcaggctttcaattgcttccagttttgttctaattttgtaaataactctgggatgcatatcctgatataaaccttcaacagcatcgctgattagttgagcttagatttcttcaaaaggcatttaaaccaggaagccaagggagaaaaacaagaaacgaatacaaaatctggaagggaatcaaacacatcctgtaggtgagctgccactgttctccatgctgagaatgctgtttccaaaacatctgcctggctccctccttctctgctcaaacatcacctcctctgagaagccctccctgattgcctgacctagactaaggaaccacccatcacttgttctcttgtgtagctttcgttcctattgggcttcccatagtacatacacatttgcttagtgtctcctgctttctgggtgattgattatttatcatgtttaccatttgcatctgtctctcctaccagggtggagattttagtctgtcttcttcgttgcagtgtctccaatcacctaatcattgcctggcacacagtaggtgctcaataaatgattactggataactgaaaggatgttaagagaataaatgtggtgccaggatcttacaaagggctgcctacccaggtgggaagcctctgcggtacacctgtgtccatggattccaagatgcttggagcgactgtctggactctccgttgatctcaactactagcttgttcagagctgggtaaatggagttggctggcaaggccacacccactggcttcggctccagcaccagtcatggaggacaaagatttccagacactctgcttgcctatggccaaacagatcgaggctcattctaggatagacccagggcagggctagcccaagggagatggctgggcacgaaggcagaacccaagagtgctccaacgtagcagctgtgtcctcctcagcagaaactcaaagatgggcaccttagcccctgcaccctggcattgacagacgctactcgttgttttaggggtagagagaggggttatctcactttgggaagccccagacaagagttcacatgcaagtcgttttatttaggaggagttataaatggaattacgtcctcctgctacacacacaaaaatgtttaagtcctaaccccctggtacctcagaatgtgatcttatttggaaatagggtaattgcagacgtaattagttaaaattaggttggactggagtagggtaggttctgatccaatacaactgatgtccttctaagaagaggagaacacacacagacacacgaagggaggatgcttttctttttctttttttttttttttttttttttgagacggagtctcattctgtcacccaggctggagtgcagtggcatgatcttggctcactgcaacctccatctcccgggttcaagtgattctcctgcctcagcctcccaagtggctgggattacaggcacccgcccaccacgcctggctaatttttgtatctttagtagagatggggtttcaccatgttggccaggctggtctcaaactcctgacctcaagtgatctgcctgcctcggcctcccaaagtgctgggattacaggcgtgagccactgtgcccgggctgggaggatgctattagatgacagaagactggaatggagaatgaaggctctagaagccaaggaatcccaaagattgtgggaaaccagcaaaagccaggaagaagcaaagaaggatcctcccccggaggcttttgaggggcgtgttgtcagctctgctaacatcttggggttggacttctggcttccagaactgtcagaccataaattcctgttgttttaagctactcagtctgtggtgcttcattatagcagccccaggaaataaatctaaaagttcatcccaggaaataccagacagggaagggaaggtggcaagtgaagggtgtgtacgtgaccaggttaaccctgcgggcaaccagagcctgatcccactggagagatgcagggcagagcaaaacgcccgacagggagggagctggggtatttatccactgacttctccaggcactggatgggggctgctcctaggggttgtccatgcaggccaggtgatcacagcagccccagagagaggcagagagtgacagctgattgcagtataaggcatccccgtcctcaaggaaccttggtcttctgacccagggtttcctgacagaaaccttactgacatttgggcctggatcattctctatggtggggcagaggtgggggatgctgtgcattgtagaatgttgagtagcatccgtggcctttacccacttgatgccaatagcatcctccttcttcccatccagttgtgacaaccaaaaatgtctgcagccactgccaagtgtcccctgggggcagaaatcatccctgggcgagaagctgtgttctaggttcacattaaggccaaatcattgcatgggctgctaaccaaaggacgagggtgggatgtaaatgtgtggaaagtgctagaaagctactctgagttagtggttaatagcagggccagcgaggggaataaagtaagacctctcacacctcactccacttcctcaggcactgctggagctgttctaatgaaaaattcatgcacatttctaaaaggaacaccatgcagggtggggaatttgacttacacggaggtcaccccgggccaggatcagttctaaacacttcatgcgaatccaccttacttagtcctcgtgccttgtgaggtgggactatgcttctcttcgttttgcacatgtggaaatagtggcacagagaggccaagcaccttgccgaaggctgcacagcaaggaagtggaagagtcggaaggaacccagacaggctgacacctgagtctctgctcttaaccactcagtttgtgtccccagaggtggcttagctctaagcttagaggcttccaagggaaacacccattggacaatgatgtttataaccgagccctctggaaattcatgcttcctgtcccaccactgggcacgcccccagcatcttaatctgaacccccagacgctttctctggtcatccaaccctgtgacatatcccttttttatgctcacaatttttttcagctcccattccccactcccattctctccctgagttcccagccttctccatttcccagtctctttccctctcaggagggttcatttcctgctggaacctcctctcacaccagccttgcaaagtaaaaacctagaacccacaaaaattccccagtgagttttggccaattgggctgaccctttgtccaagctgtttgcaggtgacggccaagagagggcctgagctcggatctgctgcatgttcccagagatgctacactcagacgaggttttcatgcaaattagaacaccatgtcccttccccacatccttttttctgtcaataaattatcaggataacagtagaaatcgtatgttgtctatgatatgaatgacattcttgtgcagtgcgtgacaggcgcaactgttcatgtggctccttttgctgcctactcccaactaaaacgggcctttgttgatcaggattacaaggatgagtttttgcaaatctccctccacccacaagtggggaaattccttaacccatttatgccggaggttgcaatttttgtgtgtgtgaaaaatccgaccttagtgatgaccttgagcagcaggatgtaaataactcccacaggattagcattccaataatggaacactaggcataaatgggttgttaaggaacatacactaggaccaagaggaaagttcagcttctctatgtacaggaggaggaagccaggtattgctcccgggtcaggccaaccgctggcctaaacttcaatggtaatttcagcccttagggcaggtgaagaggagacctccactggtcaacagagctgtgtgtatggagcagccccagggtgctctatggggtcactacagttgtggcatccttgtgtttgatcctgaatccttggctctgccccactccagctgctgacaagtgacctgcctggggactgcttacctgcatagtaggtgagggaaggtgaactgtggtgaggacagagtggggtttaaaacttgcacacctaaatatctatcaaaattataaatgcatttaggctgggtgcagtggctcacacctgtaatcctagcactttgggaggctgaggcaggaggattgcttgaggccaggagtctgagagcagcctgggaaacatagtgagaccccatctctataaaattgttcttaaaaattagctaggtatggtggtgtgtgcctgtggtcccagctactcaggaggctggggtgggaggatcacctgagcccaggagtttaaggctgcagtgagctatgattacaccactgcgctccagcctggacgacagagggagaccttgtctccaaaaaaacaaaacaaaaatcttccccaaaaataaaattataaatgcatttagtctttgatcctgcaatcccacttctgggaatggagaccctccaaccccctagctatatctgcaaaagtatgaagaggtacgtgcaacatgctcctggcagagcagcatcatgttccatgtcagtggacaggaagccagtcaagcatttctcttaatggcaaacaaataaaactatgggcagccacacaatagaatgctatgcagctgtgcaaaagaataaagaaggccaggcgtggtggctcacgcctgtaatcccagcactttgggaggcagaggcgggaggattgcttgagcccaggagttccagacctgcctgggcaacacggaagaaccctgtctctacaaaaattagctgggcatactagtgtgcacccgtgaagagactgtccatgtcctgcagtggaaagatctctagaacgtgtggttatgagaaaacaaaaatcacagaattgaacagcatgtatagaatgctactccttgggataagaaagaggggggaggacatagattcgattatgcttataattataattgcataaataaacattggaaggatattctgaggaactaaaggggttgcatattgtgggaagaggaagtagcatgcaagtgggggcagggatacatctttccagaaacatccctaacatttttaagatctagggcaagagtacaaaagcagaccacatactacggggaaatattgaaaaggtaactaaataaaacatgctgtgtgcttctactttgcaaatataccttcctttacactttggaaggtcagggtggaatttagaatccggatatctgcactgggtcaaggtgtggggagagccagccctgtcctgtccctttctcttcttagtcatggctctgtcctgccagaggggctccacacatatgtgtgggcattccagcttgtacatccaagctctggccacatttgtgttaacagccacccctcggatgtccttggccctcagttgggttacgaacagatccatatgagaattgcacgcaagttcatggaatctggccatgggcagggaattccaggatcctggtaacttaaaacatggcctacaaagtggggcacaagctcttggtagacacatccccttggctccaggaacttctcatcccacggggagtggtatggctggagaaggactgggtgagcctcagggcagggacccctcgcctacgtccaaagatattactctatcttttatctgtgttggtttttggatcacataacctttccgtattcaaaaatctaaaattatatctaaacacttgcacaatgaaaaatgatgttgcatctgggggccctccagacttctatgccctatagttagagttctgctcatgagcccctgtaatcttcaaaagcctgagcctcaggccagcttcagtggggctgtgttgtccttgggctgcctttcccagctcagggtccctccattgcagccttggagtctcactggtcccaggaggccacctccctgagactctgattgtccacacacactgtcccagcatcacttacattgtagaggagatcagtccacccttccatggttatgcactggaaaacagtcagcactgcaaacaggatgttgtcgaactgagtgatcccgttgttgggcccttcccagtagggctgacatttggtcccattggggcaggtgcgggcgggctcttctgtcccacatggagccggagactcaccctgaatgtcatctacaaaagggaaggggagaaaagtcaggggaaggagcagggaaaaccagctctgagaaatagggaccagtgactctataatgctgttggaacgaataacttttgggacaaacgtgatcagtcttcaaagagatcaatgtttggctttgggggtctattattggttttctattgattaatttcttctctgagctttactacttttctctttatgttttccatgagttttttttttttttctattcttttcctaaacttttgagatggatggattaactgcctttaaggctataaattgcctttaagtgtggctttacctgcatctcaacattttgtcatgcattatcattattgttcaagtaaaatattttctaatttccattattatttcttctttgacctatgggtaatttagatgtatttgttttttaaaaaaacttattaggtgtctgtgtgtgtgtgtgtgtatatatatatatatatatatgaagacagaggggagaggaagacagggagagaacggggggagagagagagcgagagagaagtataaaacaatataatgattcaccatgtacctatcaccaatttagacacttacctatttacttctggcaaattttgtttcatctattcctctgtatcccctccaaacactttgccttgccactagaatttttttttttttttttttttgagacggagtctcattctgtcacccaggctggagtgcaatggcatgatctcacctcactacaatctccgactcccaggttcaagggattctcctgcctcaggctcccaagtagctgggattataggtggccaccaccacacctggataatctttgtatttttagtggagatggggtttcaccatgttggccaggctggtctcgaactcctgacctcaagtgatccgcccgcctcggcctccaaagtgctgggattacaggcgtgagccactgcacccagcctagaatatttttaaagcaaagctcagacatcatatcatttcatccataaatgagaggcatgtctgttaatctgcaaacacttttagagttctctttttgttactgatttccagcttaattgcattacggtcagaaaatatgttttgtatttgtatttttttcagctttttgacctctgttgagacaaactttatggtccataatatagtcagttttagtaaatgtgccgtgtgcatggtgtagctggtaagtgcagccttcttccgacatccattaggacaaatttgtcaagcgcattgtgttattctcctataagccttgctgatttttttcttcttgggatgtactgggctcagggagctgttctgggggtgagggacaccagtacacacagttcctacccttgcctaagggtaaggaacaggagctgagctttctccccaaatagcaggaggcaggctgtgaaaatgccacaaggagagagaaacgtgccaacagacaccccttttgctggaaaccaaagacagcttcctggggaggtggcagtcaggctgaacgctaaaggtcagtccaaatcttaaggtattgatggggtagggaggcaggaaagctcacatctgggagtgtcctcattttaccagcacagcgggtctgagaggaccttattctgtgagcgatgcttttgaaggttttcaaagacgaccgtggcattgtcggacaagaaaacaaacagctgagtgtgtgtaaactcaagcttcctactcaacaaaaatatctctcaatgtatgtgctacagacttcgcagcaccaattctctgctcccttgactgagcacacagcagagggaaataaaccaatgctgaatgaatgaatcttgttggcctttcaagctctggctgaatagaaactccaagtctagcctcgccatgaacttaagttgttggaaacgccttcctcacttatgctggacttggtacatgaactattatttgataaatacaggttggaaggcaaaaatcttttaaacataaggctcagggcagagaacaaaataaatccatgggttcctataataaatgagaactatcgtttagcatggcacctgtgcctggaatcttctctgtctccacgccatgtccaagtctggctcaattcccaccctccatgtagcctctttgtgtagcccagttaacacagccccagtccctccctccctcccttccttccttctttccttcctctctctctttttttttttttttttgagacagggtctcactttgtcacccaggctggagtgcgggcaccatcatagcttactgcagccttgcagcctccaattcctgggctcaagtgatccttcttcctcagcctcctgagtagctaggactataggcatgtaccaccactcatggctaatttttaaatttttttattttgagacaaaatctcactctgttgcccaagctggagtgcagtagcgtgatctcggctcactgtaacctctatgtcccaggttcaagtgattctcctgcctcagcctctcaagtatgtggtactacaggcacacgccaccatgcccggctaatttattttttttgtatttttagtagagacggggtttcactatgttggccaggctggtcttgaactcctgaccttttgatccgcctgcctcggcctcccaaagtgctgggattacaggcgtgagccactgcacccggccaatttttaaatttttattttagcagagacagggtctggctatgttgcctaggctggtctcaaactaacggcctcaagggatactcccacctcagcctctcaaagtgctgggattacaggtgtgagccactgcacctggcccctttcaggcatacaatagctactgaattttcatatttaggggggcgtgggtataatcacacattagccttcactgttaaaaatggctgcaaatgaggggtcttgtttcctctaactattttggaagctcttagaaagcaggaagccttccactttatctttgcttccttctaagcgattggcacggtgctgggcacacaggaactgggctcccgacactgaggaatgctactgaaaacgggtctatctttagcagctttgcaatccccctcaaccccccaaccaccgacacgaaacactctgagcgttgcttctagaaaaacaagcgtccagagtgtctgaggaattcggttataaatacattttaaaattaacccactgcctgggtgtctgtatatatctgtctcttactcacacgtcttatatttttaatcgtgagctagcttttcagtctttctcctaaatcgaggcttcctcccctctggtggcaccacccacatctgtcccctcaaaaccccactcggacccaagccaaccccatggcctcttctcctttagctagtctagggtagaaaaacataaaataaaacttcacagaaacctaggatccaggagtcctggtttctctgctcacggctgatttttccaagaggccctgccccatattcattctctctctctctctctctctctctcgcatttccgcctgggtgacgaggccaggagcagaaatagctctgcctcaattaacaccttcttcatcggggaaagaaataattaggacattccatattgagcaaacttcacaagcccaggagagaaagagacaggaggagcaagagaaaaagaggaaaaaaaaaaccaacaaaccaaaacccacaaaaaaacccaaacctccaaccattgcaaataaaccttccccagtgggttttccctccccgtggggaggagtggggagggagggctcaggggctgcctctgcggatccacttgggggtcactgggtggagagggtgggtggaaatccactcccagacagaatcttcttctgtggctgcctttcccaaataaggggcctgaaacctctttctctgcccacctgggttcccctttgggcttcttgattccttctatccactccttcaattcacagctcccttgacccaaatcatcagaaccagaactgctattcagtctgtctgcacccagatggccagtggtccaaatactgaaatactgaaggcatcccttcctacttgattccatttcattctggagctttagagagcaagcagctagagtttggatggcaaagatttaactgaaaacgtatccaagggctatttggttcctgagtgtggatcgtggtggacacactgcttccacactgctggttcagagctgagccctgggagagtgtctctgcgctgcctggcttttccggggctcaccctacccccagacccagccactgaagggttaatgtgggcatagtcagggaggggcagaatgctgctgagtgctaggttctgattggttggtgccaggactcccaattggggtatctctggtacatcctgggggttgggggagaccaggaggactcatccagtactctcacccagcactcagggcagagaacaaaataaatccatgggttcctataataaatgagaactatcgtttagcatggcacctgtgcctggaatcttctctgtctctcaccttccacaaggtaccactcacaatgcattgaggcaataacccttttctggcccaactctccccacttcttgcttgctttagaagtcaggactggtcgaggtctgaaagcacccagaatacctgttccactcagccagatgtgccaggcattaattcccactctaggagcagtcctcaccaatgtcaaaaagaagccagtgtataaataccccagctcccttgccccttggctgggacggctctgaggtgtgtgttctttttttatttatatttttatttatttatttatttgagatggagtctcactctttcgccaggctggagtgcagtggtgtgatcttggctcactgcaacttctgcctcccgggttcaagtgattctcctgcctcagcctcctgagtaattgggactacaggtgcctgccaccacacccagctaatttttgtattttttagtacagatggggtttcaccatgttggccaggatggtctctgactcctgatctcaggtgatccacccgccttggccccccaaagtgctgggattacaggcgtgagccaccgtgaccagctgagttgtgtgttctttgctgtctcccagaggtgcccagggggatccagtcccagttttaagtggtaacccgcttgatagcacactctttaaaagatcccttctttctctgctcacttcctcattcccccgatggtgcttcctgggatcattcccaaataaactctttctctgctgggtcaccttctgtggaaccccacccctttcaacagctaagatctcagaggctatttcactcactgcctctcctgtagtgctctctgaaggagacggtcctcccagctgccaggagaaagaagcacacccctgcctaatcctcccaagagcttgtccctgaaggagaaaactggaaagatgcatcatgctccgtggacctacctgtcccctcttcaaagcaggtggtatgaaattttcccatataaaattctaaccctatgattgcaaaaataaggattgcaaaaaataggaggaggccgatctgcagcaaagggatcatcgccttcatgatcgacttcaggacgacttgtaaacctggggggacacagagagaggccccataagcccatgagcaagtacccccaaaccccgccaccaagacgcccaggtctctcccagacaaagcaggtgtgttcctgagggaacattaagcacccaggagcctggggattgggcaatggtgaaggaagcaccacacggaggctgatccttatcatgggaacaacacttcctaggttttttttttcctttgagacagggttttgcactgctgcccaggctggagtgcagtggcacaatcacagctcactgcagcctcaacctcctgggctcaggtgatcctcctgcctcagtccctgcaatagctaggactacaggcatgcaccaccatgcctggctaagttttaaaacttgtttgtagagatggggtcttgctatgttgcccaggctggcctgaaacccctggtctccaaggactcaaactcctcagcctcctaaagtgctaggattataggtgtgagccaccatacctggcccctattattattattatttattttatttattttttttgagacagagtcttgttatatcgcccaggctggagtgcagtggtgccatctcggctcactgcaagctccgcctcccaggtttacgccattctcctgcctcagcctcccgagtaggcccagctaatttttcatatttttagtggagacagggtttcaccgtgttagccaggatggtctcgatctcctgacctcgtgatccacccgcctcggtcttccaaagttctgggattacagacgtgagtctccacgcctggccttattattttttaaaaagcacttttaactttaaagtatttatttatttatttattttaattagccaggcatgatggtgcatgcctgtagtcctagctactctagggactgaggcaggaggatcgttaaggctgcagtgagctatgattgtgccactgcgccccagcctgagtggcagagcaagacgctgtctcaaataaatctatatatatattttatagagacagggtctcactatgttatccaggctggtctcgaactcctgacctcaagcgatcttccagcctctgcctcccaaagttctgggattacaggcatgagccacagagcccagccaactttaaagtacttaataaaggtatttgacatgctgttccatttgatgatcttttgggcaagaaaggggtgggagtccattgcttttggagccatattcctgggtgttgggcaacttgcacccagaagagggagccattttcttaattttttttttctgccaagaggcggtgtcttttcctcattcataaaaggccgccatataggctagttgctgctctgggtaggaaagcggttggcggtcccaatttcaaccccaaggaaccagactcaacattatttcactggcttctagtgacaagcccctgaggtggccatacatgtaaagtcactctcattttacagaagtgggaagcaaggctaacagagatgctgtgattcacccagagaatgcatgagaaatggcagaactaggcagggcgcggcggcggttcacgcctctaatcccagcactttgggaagccgaggccagcggattaacgaggtcaggagttcaagacaagtctggccaacatggtgaaaccccatctctactaaaaatacaaaaaattatctgggcatggtggccagcgcctgtaatcccagctacttgggaggctgaggaaggagaattgcttgaacttgggaggcagaggttgcagtgagccaagatgacgccactgtactccagtctgggtgacagagcaagactctgtctcaaaaaaaaaaaaaaaaaaaaaaaaaggcagaactaggatttgaacccaggtccatctgaaatgaagccccatgtttgcccatgtgctgatgttgctttctctgttctgagcaacccaattcagaaagatggtggtgaataagaaggcagggggccaggtgtggtggctcacgcctgtaatcccagcactttgggaggccgaggcgggcagatcacgaggtcaggagatcgagaccatcctggctaatatggtgaaaccccgtctctactaaaaatacaaaaaaattagctgggcgtggtggcgggcacctgtagtcctggctactcgggaggctgaggcaggagaatggtgtgaacccgggaggtggagcttgcagtgagctgagatcacgccattgcactccagcctgggtgaaagtgcgagattccatctcaaaaagaaagaaggcagggaacagtccccgaagggacacagtggaacagaagacacacccaactgggcatctgaagacctaaatctgggggtattgtcatcaatcagggaccccatgcaagctcttatcctaccaagctcagcctccagtagcctctcatctaacaaatggttcattcatggcggctgaattactctgggcttcaaatccttttgggagaggaaggggttaatactgaaattcgcatcctgcactaaaagttccactgttgtaagactcgaagaatgttaataataataatagctggccaagcgtggtggctcacacctgtaatcccagcactttgggaggctgaggcgggtggatcacttgaactcaggagtttgagaccagcctgagcagcgtggtgaaaccctgtctctacaaaatacaaaaaaattaactgggcatggtgctgtgtgcctggagtcccagctatttgggaggctgagatggtaggattgcttgagtctggggaggttgaggctgtactgagctgtgattgcaccactgcactccagcctggcgacagagcaagagccttagttagtatttctctgcctatcattggcttttttttttttttgagatgggcttgctctgtcacccaggctggaatacagtggcatgatcacggctcactgcagccttgacctcctgggcacaagcgagcctcctgcctcagcctcccgagtaggtgggactacaggcacacttcaccatacctggttccactaccatttttttcttgaggctattaactcaggtctgaacgatgacaacatcctatgtttgtaaccactatggtatctactaggaaagtctatgatcaaaatgaaggttcaaacatatagcctgaggctttgcttcttgattgcaggaacttcccatggctcttgatgggtggagaccacagtaagagagggaagctgtcaggatagctcgaggggccatgccactccaagggcttaaaaatgtaatgtgggtgctggccgggcgcggtggctcacgcctgtaatcccagcactttgggaggccgaggcgggcggatcacgaggtcaggagatcgagaccatcctggctaacacggtgaaaccccgtctctactaaaaatacaaaaaattagccgggcgtggtagcgggcgcctgtagtcccagctactcgggaggctgaggcaggagaatggcgtgaacccgggaggcggagcttgcagtgagccgagatctcgccactgcactccagcctgggcgacagagcgagactccgtctcaaaaaaaaaaaaaaaaaaaaaaaatgtaatgtgggtgctaacagatgcagtgtggtgcagtggttaaggtgctggatactcttggtgtctggccaagatcccattttctttctggtgtacccgccctccagctgctatggatgttggttgctaatgcctcccagctgcctctcttcttagtagaattgcccttggtgatcaaaagctatctcacctgggagctactgcgtctctacctcccatccacagtgactgactatagaagtacaaaaggccggcatccttgccatgcattggaggacaactctggtgtcacacacactccagctgaaattgcgtccctgctctatccattccccagccccaccctgctgatctcctgctgtctctcccaagagccgtcccccaataaagcaggtgcatctgaacacccacctaagtatccgcttcaagggaacctgacctagtcatccacttactagtgaattccaaacctcagcttctccatctgtaaatggggactgcaatagtacctccctcatacgattagatgagagagttcacacacagtgaagtacctggtaagtcataggtggtcattaaacagagactcttgttactactgctattataatatacatatattttttgagacagggtcacactttgttgcccaggctggtgttgaactcctagcctcaggcaatcgtcctgccttggcctcccaaagtgctgggattacaggtgtgagccactgcacctggctcttttgactattagatttgggatggcccttaatttaatatgatgcaggcatctgctgggatcttgcagagaccttggatagaagtgtcttctttctacaaaaagatcctgctggtgatcctctgggaaatcttactctttaaacctgggtagcaatgaaccggaagaacgaagccaataaaatgtaaaatggtgataataaaagagactacttcacaggcttgttgggaggataaaggactttaaaaaaatggaaatacttagaataatgtctggcacatagtaagtgctttttaatttttttttttctttttttgagacggagtttcactctttcatccaggctggagtgcagtggcgtgatttcagctcactgcaacctccgccccccgggttcaagtgattctcctgcctcagcctcccgagtagctgggattatagatgcccgccaccacgcccggctaagttttgtatttttagtagagacggggtttccccattttggccaggcaggtctcgaactcctgacctcaggtgatccacccatccaccttggcctcccaaagtgctaggattataggcatgagccactgcacccagcctataaattgtttgtttttaaactttttgttgtctgtttttttgagacaaggtctcactctgttgtccaggctggagtgcagtggtgctatcacagctcactgcagccttgacctcctgggctcagatcctcctgcctcagccttttaagtagctgggactacaggtgtgcaccatcatgcctgctaatttttttttttttttgagacagggtttcgccatgttgcccaggctggtcttaaaactcctgagctcgctctatctgcccgcttcggtctcccaaagtgctgggattccaggtgtgagccactgtgcccagtcaacctggctaatttctaaaaaaaaaaaaaaaatttgtagatattggcgggggggtgggggtggtgttcctcacaatgttgcccaggctggtctcgaacttgtggcctcaagtgatcctcccaaagtgctggaattacaggcatgagccaccatgcctggctaaattattattattaaccaagacaagaagatagaaaaaggacagccctgttttatttttgctttttacatttttttttggctcaacctacacttaatcttgaccctgcatatggcagccacccttaaacggggactagatgtatctgtggagaatgagaaagcagcaaggaatgagtatgaattttagagctcattactgtccactctaagaattcaggtgagtaatttaacctccttaagcctcaaccgtctcatctgtaaaatgggtgttcgctgggtgactgtgaggatgaaataaggtaattcatgtaaagtccttctgtagtgccctgcacgcagcaggcactcattaaatgggaatggtcattgccaccagtggtacggcccaggcttggagtcacacttgctcactcctagttctgccacttctcagccacaaaaccctgctccaatgtttcagccactctgagcctcagtttccccctccataaaatagagacatcagtcctatcaacttcatagggctgtgagtactgaatgagatcacacgtggtgcttagcatggctcccgatagacagtaggtgctcaataaatgggtgtggctcctagtttgctttcaggagctcatggggagctacagtcatattcctagggggttccctatagggagtcccaaagaagagactgccctcacacaggctggtggcaggatgtggcctcctgagatgctctgcataggggaaactgagggctcctggggcccgtgagcaaaccccttgtcagggtcggaaactcacgcacttgggattccagacaccagcttgagcggccgcagcactcgaactgccctcagcgtccgtaggtcaaactccgtcccaactgtcgccaagatgctgaaagaaagaagccagaatggagaacagagggtgggttttgggggtcagacagcagggcgggggtgcttgggattccaagctgtcctgtattggttgggtgaccacaggcaggtgactcgacaccactggcctcagttttgtcacctgtaaaatggtcttaacagtacctgcctcacgggataaaaggtgatttacgaagacccccaacagatggttcatgttgcacaaatgttgcaatgagagaaatggaatcttccccatggctcaaggttggggtgacattcagtatatttcacaacctacaatgacaatagattgtggggtggcctggggccctgggggaatggcagacctttcggggtttgtggctctttattttattttattttatttttttgagacagagtctcactctgttgcccaggctggagtgcgatctccaatggtgtgatctcagctcactgcaacctctgcctcccgggttcaagggattctcctgcctcagcctcccgagtagctgggattactacgcacccgccatcatgcccgggtacttttttttgtatttttgtagagacagggtttcaccatgttggccaggctggtcttgaactcctgacctcaggtgatccacccgcctcggcctcccaaagtgctgggattacaggcgtgagccatggtgcctggcctggtttgtggctctttaacaaatggcaggaaagtagttcagtgttaagagcccagcctgcatgggttcagatcccagatctgccactttccagttgggtaaccttgggcaagggacatccctgctctgtgcctcagtttcccccttttgtataacctggataacaatagtatcaatacctccaagggttgtgaggattcagtaagttgacaaaaagtggtcagcacaatgccaggcacacaggttaccggtatgctaacctattcagaaataaataagaaaacaaaaaaatgggtgtgatcctgcttgtgtggaccagccagcatcagctggctagaaggcagctacagaccccaagcctctggtcaaaaagagtcccttttgtaaatgcaagttagtaaggatgatagcagtaggtgggatgaggcttccatagaaaccctccgagcaagaccctgtcatgagacctcatttgtaaaagtattgctgttgaaacacagggtcccacctggccctgtttcctgaacatgtccatttcagagctaagtgatgtacagtgcgtggtcaaggcacaatacaataaaagagactgtcatcagaacttcatataatggacaagaaatgctgaataccagagggtctgtggttaatggaaggttggtcacagcaaataacttggggatttttcagtttatttttattttagacatggggtcttgctctgatgcccaggctggaatgcagtggtgcaatcatagctcgctacagcattgaactcctgggctcaagcaatcctcctgccttagcctactgagtagctgggattacaggtgggaaccaccacatctggcttgatttttcagttttatccaggggcttgggtcttaacacttcagtctgtggccaactggtatctgtacctcttgccttagggctgtctccaaatctggggcaggcccagggaatgaactttaagggagcagccctcaaccaaagattgctgggagttggtggatcaataccgcagctccctcacccttcattctggatcacttaagaggtgagttccacgtgggctcccagtaggacggagctcagttgcctacaggacaactcacccttccttgccccacctcccctctccttctccaacccttctggggtcacctctcagatgaactacttgcacaaggattgccctaaattcttgtttcaggatctattctgggtcatcctaaactaacacaaagcaagttcccaactttttttctcaagattacccctagaggagagatgggcatattaggttgggctgaccttttccaccatccacaagtgggcgtctgagcgtatcctatgtgctgggtagagtgacatatgagactatccctgccccatggagctgatgcagaagagaagtggttaagaaaaacatgcacacaatgagtgaatctgttgcaggtgtgatgccttctcagctaggaagacaatggctttgaggggcacacagcaggtcgtgttaactagtccagggcctgggataccccctacttcaagtcaagttcccatagatgagggggagaaatctggccagtggggaaagaactttccaggctgagagtggccatgacagagagcttgggactgaaagagggcttggcaaattcaagaaatgacatggtgtcaccactgggatttggatggtgaggttcaagcagcaagtcatgaagccagagtaggcaggggccatgacatacaactttacaaaaaatgaatttatttatttttatttttggagacagggacttattctgtcacccaggcttgagtatagtggtgcaacaacagctcactgcagcctcaacctcctgggctcaagcgatcctcccacctctgcctcctaagcagctgggactacaggtgtacaacaacatattcagaaaattaaaaaattttttttgtagagatggggtcttgctatattgcccaggctggtctagaactcctggcctcaagtgatcctctcacctcagcctcccaaagtgctgggattataggtatgagctactgcacttggcccattcaacttttaatttgatttactttatttttctcttctcctcccagctttctggtactaatttgggttcctcaaattctgacttagagatcactattctcttcttgcaccttgttttcttctgtgctggcacataaaagctgtcagggcatgaacagcaaagaacaggcagtggttaagtccttagtatttcacttcacaaacatcaactgagcactaataacaagccaggccctatctctgtgtgggggagactgagagtaaacccaataaatataagcaggctttgttttgttttgttctagagatggagtctccctgtgttgcccaggctggcctccaactcctgggctcaagggatcctcttgccttggcctcccaaagtgctgggattatggacgtgagccaccacaccggccgaggaagacttcatttcattgtgctttgctttattgcaatttgtagatattgtgtttcttacaaattgaagatttgtggcaaccctgtgtcaaggaggtctatcagggccattttttttccaacagcgtgtgctcactttgcgtctctgtgtcacactctggtaattcttacggtatttcaaacttttacataattattacatctgttatggtggtctgtgatcagtgatctttgatgtgactatagtcattgtttgggggtgccacgaaccacatccatagaagatggcaaacttgatcgataaatattgtgtgtgttctgactgctctaccaactggccatttccccatctctcccgctttccttgggccttcctattccccgagacataacaatattgaaattaggtcagtgtataactgtacaatggcctttaagtgctcaagtgaaaagaagagttgcacgtctctcactttaaattaaaagctagaaatgattaaacacagtgaggaaggcgtgtcaaaagctgagatagggccagggatggtggctcatgcctgtaatccgagcattttgggaggctgaggtgagaggatggcttgagcctaggagtttgagactagcttgggcaaaatagggagaccctatctctacagaaaataaaaaaattagctgggtgtggtggtgcacacctgtggtctcagctacttaggaggctgaggtgggaggatcacttggtcccaggaagtcaaggctgcagtgagcggtgattgcaccactgcactccagcctgggcaacggagtgagaccctgtctcaaaaacaaaacaaacaaacaaacaaaaggccataagctagaggttagccaagttgtgaatgcaaaggaaaaattactgaaggaaattaaaagggctactctagtaaacacatgaatgataagaaagtaagacaggcttcttgctgacatggagaaagttttagtggtctggatagaagatcaaaccagccacaacattcccttaagccaaagcctaatccacagcaagcccacagcaagactgagagaggtggggaagtgcagaagaaaaatctgaagctagaagatcttggttcatgaggtttaaggaaagaaggtgtccccataatataaaagtgcaaggtgaagtgataagtgctgatggagaagctgcagtaagttatccagaagatctagctgagattattaatgaagctggcaacactgaataatagatttttaatgtagatgaaatgccctattggaagaagttgccatctaggactttcatagctagagaggagaagtcaatgcctggcttcaaagcttcaaaggacaggctgactctcttgttaggagctagtgctcctggtgactttaagttgaaaccaatgctcacttaccattcctaaagtcctaaggtcttaagaattatgctgaatctactctgcctgtgctctataaatggaacaatgaagactgaatgacagcccgtctgtttatagcatggataactgatattttaagcccactgttgagatctactcagaaaaaaatatatatataatatataacacataatatatgttatatataacatatgagatatataacacataatatatgttatatataacacactacacatatgttatatatgatacactacacataatatatgttatatatgatacactacacataatatatgttacatatgatacactacacataatatatgttatatatgatatatataacacaatatgttatatgtgacatatataacacataatatatgtgacatatatacacataatatatgttatgtgtgatatataacacatgttatatgtgatatataacacatatgttatatgtgatatatataacacatgatatatgttatatgtgatatataatttatattacatatatgttatatatataatttatattacatataacatgttatatatatatatgtattttagatgaagtcgcactcttgttgcccaggctggagtgcaatggcacgacctcagctcactgcaacctctgactcccaggttcaagcgattctcctgcctcagcctccagggtagctgggattacaggcacctgctaccatgcctggctaatttttttgtatttttagtagagttggggtttcaccatgttggccaggctggtcttgaactcccgacctcaggtgatccacacgcctcggcctcccaaagtggtgggattacaggtgcgagccactgtacccagccagaaaaaagatttctttcaaaatattactgctgacaatgcactggttatccaggacctctaatgggcatgtacaagaagatgaatgttgtttttatgacttctaacacaacatttttttttttttttgagacagagtctcactctgtcgctgcagtggtgtgatcttggctcactgcaacctctgtcttcaagagggttcaagcaattctcctgcctcagcctcccaagtggctgggattacagtcatacgccaccatgcccagctaatttttgtatttttagtagtgatggggtttcaccatattgaccaggctggtcttgaactcctgacctcaagttacccacctgcctcagcctcccaaagtgctgggattacaggtgtgagccaccatgcccagccacaacattcattctgtagcccatggatcaagaagtaattctctatttcaagtcttatgatttaagggatacatttcataaggctatagctgccatagataaattcctttgatgcatctgggcaaaggaaattgaaaactttctgaaaagcattcaccattctagataccattaggaacatttgtggctgttccagtggctcatgcctgtaatcccagcacttagggagatcaaggcaggaggatcacttgaggccaagagttcaagaccagtctgggcaacatagtgagacctcaactcaattaaaaataaaaaaacaatccacaacaaacaaacaacaaaaagaacatttgtgattcgtgggaacaggtcaaaatatcaacattaataggaattttgaggaagtcaattccgatcctcatggatgactttgaggagttcaagacttcactggaggaagacactgcagaagtgatggaactagcaagagaactagagttagaagtggagcctgaagatgtgactgaattgctgcagcctcatgatcaaacttcaatgcatgaggcgttacttgttatggaagagcaaagaaagtgatttcttgagatggattctactcctggtgaaaattctgtgaacactgttaaaatgacaacatgagatttagaatatgacataaacttagttgacaaagcagtggcagggtttgaaagaactgactccaattttgaaaaaagttctactgtgggtaaaattgctgtcaacaagcatctcatgctagagaaatctttcgtgaaaggaagagtcgatggatgcggaaaactttcttgtcttattttaagaaaatgtcacaggcaccccaatcttcagcaaccacccccacgatcagtcagcacccatcaacactgagccagtgacccttcaccagcaagatgaggactcactgaaggctcagatgattgttaacttttttagtaataaaacatttatttatttatttatttatttatttattttttgagacagagtctcagtctgtcacccaggctggagtgcagcagtgcaatctcggctcactgcaatctcccccccgcctcccaggttcaagcaattctcgtgcctcagcctcccgagtagctgggcttataggtgtgcaccaccacacccggctatttttttgtatttttcatagagacggggtttcaccatgttggctgggctggttttgaactcctgacctcaagtgatccacccaccttggcctcacaaactgttgggattacaggcatgagccactgtgcccagccttttttttttttttttttaatttttgttgagagatacggtctcactctgtcccccaggctagagtgcagtggtgtgatcacagctcactgcagtctcaatctctcaggctcaagtgagcctcccacctcagcctctcatgtagctgggaccacaggcatgcgtcaccatacccagctatttttaaaaagaatttttttgtagaaacggggtctcactttgttgcctggtttcaaatccctgggctcaagcaatcctcctgccttggcctcccaaagtgttgggattacaagccactgtgctcagccttgatggattttaaaattaaggtatgtacatttttttttagacataatgctatcatgcacttaacagactatagtgtaagcataacttttatgtgcactgggaaaccaaaaaaggcacgactccctttattgcaatattcgctttgttatggcgacctggaaccaaaccagcagtgtctctgaggtatacctgtatgacagatgttagggcgatgagtgcttaggagaaagttaccacagagcaaggggaaaggacgcgtcagtgacatggggctggcgggatgaagggagtggtgacatttctatcagtaaaggcacctgctctttaccacctggaaggcaaacagttcagtgttaaaagtgttacagggccgggcgcggtggctcacacctgtaatcccaacactttgggaggccaaggctggcggatcacaaggtcaggagttcgagaccagcctggccaatatggtgaaaacccgtctctactaaaaatacaaaaattagctgggcgtggtggcgggtgtctgtagtcccagctacttgggaggctaaggcaggagaatagcttgaacccgggtgacagaggatgcagtgagcagagatcgcgccactgcactccagcctggtgacagagcaagatgccgtctcaaaaaaaaaaaaaaaaaaaaaaagtgtttagaccagcactgcccaggagaaatctattaagagctacttatgaaattttatagccaggtgcggtggctcatgcctgtaatcccagcactttgggaggccaaggctggcggatcacaaggtcaggagttcgagaccagcctggccaatatggtgaaaacccgtctctactaaaaatacaaaaattagctgggcgtggtggcgggtgtctgtagtcccagctacttgggaggctaaggcaggagaatagcttgaacccgggtgacagaggatgcagtgagcagagatcgcgccactgcactccagcctggtgacagagcaagatgccgtctcaaaaaaaaaaaaaaaaaaaaaaagtgtttagaccagcactgcccaggagaaatctattaagagctacttatgaaattttatagccaggcgcggtggctcatgcctgtaatcccagcactttgggaggccgacgcaggcagatcacttgaggccaggagttcgagaccagcctggccaacatggcgaaactccatctctactaaaaatgcaaaaaattagctgggcgtggcggtgggcatctgtaatcccagctactcagaggcagaggcaggcgaactgcttgaacccatgaggtggaggttgcagtgagccaagatcacaccactgcactccagcctgggtgacagagcgtgactctgtctcaaaaaaaaaaaaaaaaaaaaaaaaaattaaaatttgctagtagccacattaaaaaagtaaaaagaaacaggtaaaattcatttattggtttgtttgtttgtttgtttatttatttatttatttatttatttatttatttatttattttgagacagggtctccctgttgtctaggctggagtgcagtggctcaatcttggctcactgcaacctccgcctcctgggctcaggtgatcttccttcctcagcctcctaagtagctgggactacaggtgggagccaccaagcccagctaatttttgtattttttttggagagacagggttttaccatattgcccaggctggtctcgaactcctgagctcaagcaatctgcctgctttggcctcccaaagtgctggtatttgaggcatgagccactatgcccagcctgaagcattctaagaagatcgtagacctgctgggcacaaaagctcctgcctgtaatctcagctactcgggaggctgaggcaggaggatcgcttgaggccaggagttccagaccagcctgagcaacatggcaagaccttgtcgctattaaaaaaaataataacaattaaaaaaatgggcggggcattgtggtgtgtgcctgtaatcccagctactcgggaggctgttggtgggaggaccacttgagtttgggattttgaggctgcagtgagctgtgatcgtgccactgcattccaggctggaagacagagcgagaccctgtatcttaagagataaaagatattttgcacatggttttccttggaatctggtcaatattctacactttcatgtgtttcaactgaagtgctcaaaggccacatgtggccagcggtgactgtatcaaacagcacaagtgcagagaaatagacatttgaataaagactgggagaaagcaagggaagcaagagagtgagccatatgaatatgtcagggaaaactctaggcaaatggaacagccggtgcaaaggtccagctggtgcaaaggtcctcctcccgctctccccctcactcactctgttccagccacaccaattcatccgtgttcttcaaatgcaccaggctggaccgtgcatttaatagctaggccatgcctggtgtatttgagaaacagagatgagttggtgtggctgaagcagagcgagcaagggggagggtgtgaggggacgaaggcagtgaggtgatggatggtgcagggctttgtgggttgtggagaggactttggctttttctctgagtaaggtgtgagccatggagggttctgaggggaggagggatgtaatctgacttgtattaaaatatgatctctctagggggcaaggccggaagctgggagattgaggaggaggcaactgcattgacgcagttgaacgctgataagcctggaccagggaggttgtgctggatgcagtgataacgctaagacaaactccaccctgctttagggagagaccacaccaatgagtgagtgagagattcaactacaagtccctctgaccccagggatagaggaggcagggatgaaagagggaatgattacagcctggggacagcattatcgcagagctcatgtccggggaggcagcatagcacagtcagaacatctcagacgggttaaatcctggccctgcattttctcattgtgtgacctttcccattgccttaacttgttcaagcctcggaaatgcagataatctcaccaccctgtgcaatcccagctggctcccaagatgcattacctcacagcctcctccctggaaggataagaaggaattaggaggagaacaggaagataagggaggcttctctggctaagaaagccctatggaggcagaaggctccactcagggtatgtggtaggggagaggttgggtaagctggacagtggaggctgtcaactagaggctgggtcttgtcctgtggacagtgagagtcatgtaaggttttggagcaggaagggatgtgattagggttggcgttcagaagacaagcctgacagctgaaaggacagattggtggtgatggagcagaagttaggagggagccgcaagagcaggctggtgtaatgagggctggaactaggacaaaggcagtgggagtacaaaagaggccccggtttatatatagctgccattgattgctgtgctccagggagcctgcctgggctcatcaaatcctccctgcatcccagcggttggcagtttgaggcccattttacagaggaggaaactaaagaccagataagttaatcccacatggaggttcctaccactgagtaagaactcgaaccccagaccagccacaggactccagaatcccagttctctactgtgtcatccttcaactcctgtgactagttgggcggggtgaggggcaacggtggtgaagaaagagaagaatggctctggttctgaaaggaccacggagtgatgttcattcatttattcaacaaggatttagtgagcacgtactatgtgccagatattcagagagtgcctaaagatgctaccaaggacaaagcaatagtgggaaaagatatagtatgtcagacggtgtgaagtgctatggagaacaatatggcagcccctagggcttccaatggaaagactgagtgtggagcaggagagaggtatcaagggtgactccagggttttggcctgagctaactgaaggatgaagttgctgtcaatggagatggggaagatggaggaagaaggtttcaaagatcaagaactgggttgtagacatgttgagtttgagatgccagttttccgtcactccttagttaaaatcttccaatggcttccatcaggcttggagtaaaatttaaagtctaccatgaccacatgaccttgcgtgatgtgactcctgctgaccaccttgtcccacaacaccctggccactccgacttcctttctgttctgccagcaggaaaagctcactttctgctttattgagaattactatattggctgtctcctctgccgtccccattccttcaactctcatcttttgcctagctggcctcttcgaattcttcaggttgaaactcagattctgccttctcagagagaacatccctcaacttcctagctaaagagatcctgcctcttcactctctggaattatattgtttgtttgtttgtttatttatttatttttaagacaggatctcactctgtcacccaggctggcgtgcagtgcacagtcacagctcactgcggacttgacctctcaggctcaagcaatccttccaccttgtcctcccaagtagctggaactacaggcatgcattaccctatccagctaatttttaatattttttttgtagagacagggtcccagtacgtttcccaaggtggtctcaaactcctggattcaagtgatcctctcatcttggtctcttagtgtttggatgataggcgtgagccaccatgcctggccgtactgtttattaagtcgtatttattattcatgctttcttctagaatgtcagctccacgaggacaggggctttttttgtatagcatctttcatggcctagtgagtactcaataaatattgtggtgggtgaataagtgaggtgtggcagaggacagggttatggaagaccagataacccagggtagatgagtgaagtggaaaaagccaagggtccccagtggagagggagaagacacagacatgggaggagactggtgtggagaatggcatacctgacagtcaagttcaaaagcattttgaggctgggtgcggtggctcatgcctgtaatctcagcactttgaaaggccgaggcaggtggatcccctgaggttaggagttcgagatcagcctggccaacatggcaaaactccgtctctaccaaaaatacaagaaaattagccagccgtggtggcgggagcctgtaatcccagctacttgggaggctgaggcaggagaatcgcttgaacctgggaggcagaggttgcagtaagctgagatcgcaccactgcactccagcctaggtgatgagagtgaaactccatctcaagaaaaccccccaaaaacaatagcaacaacaaaaacacacagaaataaagtattttgagaaaggagaggtcactggtctccagggccgcacagaggtgagtaagagtaaaggatgaagaatgcatttcatacggcatcagggtcacgtcagtcttgcgggggctgatggttgagggagaacaagaggagaagaactggaaatgtgagcctgggtaggagaggagattttcagggtgggagagaactgaatatgggtcaagggagagaagttgatgatgtatctcttggcctttagagagctgcaccgcccaataaagtaaccactagccacacatggctatttaaatacagatttaaattcatttaaattaaatgaaaaattcgcttgtaccagtcacgttttaagtgctcccaagccacatgtggctggtgcatacatacatacttcatcagtgcagaaagttccattggactttgatgttctagcatgtccatccccgtagggcagatattttctattctttctttctttttttttttttttttgagacagggtctcattctgttgcccaggctggagtgcagtggcacgatctcggcttattgcatcctccgcttcccaggttcaagcgattctcctgcctcagcctcccaagtagctgggattacaggcacttgccaccatgcctggctaatttttacatttttagtagagacggggtttcaccatgttggtcaggctgatctcaaactcctgaccttgcgattcacctgcctcggcctcccaaagtgctgggattacaggcgtgagccactgcgcccggccttcttttcttttttagagacagagtcctagtatgctgcccaggctggactcaaactcccagtctcatgagatcctactgccttggactcctgagtaggtggaactataggcctaagccactgtgcctggctttgcaaaatttatttttattttttattttattttttagaaattttcatctgttttgttcatagcatctccagcacctaaagctgtgcctggcatacagtaggcactcaataaatgtttactgaatgaataatgaagcaaaaatgtagaaaagtgtggttgataattaacagagtatattctagaagaggtggaaggctcagtatttaaagaagagagtccaggcgtggtggcttatgcctgtaatcccagcactttgggaggctgaggcaggaggattgtttgagctcaggagttcaagaccagcctgggcaacataaagagaccccatctctacaaaaaatataaaaattagccggccatggtggtacactcctccagctgctcgtgaggctaaggtgggcggatcacctgagcctggcaggtcgaggcagcagtgagctgtgattgtgccactgcatttctgcctgggcaacagagtgagaccttgtctcttaaaaaaaaaaaaaaaagaagaagaagaatggaagacacagttgtccatccaagagccaccaccactacccgccttactggcagagcccacctcccatcaaagaggcagaaaatgcctaatagtctctttttcccaagattccttgcaataagagcacttgtcacatgacccattcgtaggcctaacaggatctgggtgaaaaatctgctgggtgcttctggaaaaggattttttccccgtgagatgagtcacatggtaagagacagcccttcctctccctcttctttggccggatgcttttgtgtctgtctacgtggatggctgggtaagtaccttagaactgaggcagtcatcggccgggcacagtggctcacgcctgtaatcccagccctttgggaggccgaggcaggtgcatcacctgaggtcaggagtttgagaccagcctgaccaatatggtgaaaccctatctctactaaaaaaaatacaaaaaattagccggatgcagtggcaggcacctgtaatcccagctactcgggaggctgagacaggagaatcgcttgaacccaggaggcagaggttgcagtgagccgagatcatgccactgcactccagcctgggcgacagagcgggactctgtctgaaggaaaaaaagaaagaactgacgcagtcgtcttggggctgtgagtggtaaatgttaaaaaaagtccttacagtgacgatgttagagtggaaagatggaaggactctttggagacattgttgagccaaggaaccaaccctgcaaccaacctcctggcctccagacttcttttgtttttgagacaaatctcactctgtcgcccaggctggagttcagtggtgcaatctgggctcactgcaacttccacctcctgggttcaaatgtttctcctgcctcagcctcccgagtagctgggactacaggcgtgcgccaccacgcctggctaatttttgtatttttagtagagatggggttcaccatgttggccagcctgttctcaaactcctgacctcaggtgatccaccccacccgtcttggcctcccaaagtgctgggattacaggcatgagccactgcgcccggcctccatttttattttcttaattgtagctaagtcatatcagaacctgctgattaaaggagccaatattcactaaatgtattctcttccaggttgtgtgcttgttactttacattctgagagctcattttatgctgcttaccagggacttgttctattctccctttcattgatggggaaattgagacccatggggttaaactacttgtccagctaacatgtggtgcctgcgtgctacgtctggttttacccattctaccatgctgctcctggttaactctgccaccccactcaccttccccactgggacctcagccaaactcatgccttcactagcctgagcatgggaaggaggtcaattctctgctggttggaagtcaggatgtcaataaatatttacagaggagcaactaccatatgccactcagaagagaggggaacatgtgcaaaggccctggggctggagagacctcatgaagagaagtgaggttaccagttgagaagtggaggcagaggacaggagtttgagcccaagagtttgaggctgcagtgagctacgtcactacagccagtgcaacagaatgacatcctgcctctaaaaattaaaacaaaattaaaaagatgacacagaggaatgtctgcaaatcagtgagaataacacagcaaccccaataggaaaacaggcccaaaatgtgaataggcagattaggggagtgagaaggagaggagacaggagagtgagaagatgttagcatggttagaaagcaggggaggggatggggatgtagtggccccctaacctcaggttagataaagtacctgcctcttacagactcaggccaaatatttctaagatgggtaccaaggagcagaaccacttcccatacagtctatattcttgccactcctaggttgaggactgagtgatcctcttcaagttcattcttaaatcacccagctttccccttcttgaaaaaacgatttcttcctcttcttttttttttttttttttttttttttttgagacaaagtcttgctctgtcacccaggctggagtgcaatggtgtgatctcagctcaatgcaacctctgcctcccgggttcaagtgattttcctgcctcagcctcctgagtagctgggattacaggcacatgccaccatgcctggctaatttttgtatttttagtagagacagggtttcatcatgttggccaggctggtctcgaactcctgaccttaagtgatccacctgcctcgccctcgcaaagtggtggggttacaggcgtgagccaccccctggcgagaaaactatttctgaaattcattttctgaatcttcaaatgcagagtcaagttctttgctctcctcaggttacgggatatctttacctttggtctgtatgacgcctgtctcttgtttataccttcattcattcatgcattaattcccctatatctctctataccctactttcattcttctccctcccagagacaactgagagaatgtttaatttggccttataggagtgcattctcgcaaaaacacgtgcgatattttgagtgtgtctatttttaactgacataagcaggatgaagttagacacattctgttgtttcctgttttcacccagaaccatatttttattttttgttttttaaattttttgagacagagttttgctcttgtcacccaggctggagtgcagtggcacgatgtcggctcactgcaacctctgcctcctgggttcaagcgattctcttgcctcagcctcccgagtagttgggattacaggcacccgccaccacgtccagctaatttttgtatctttaatagagacagggtttcaccatgttggccaggctggtctcgaactcctgacctcaggtgatccacccgccttggcctgccagagtgctgggatgacacgcatgagccaccgtgcccggcaacaaccatatttctaaaagccccatcccgtagtatctgtcggatatgcggtctggagctctcactcattctggtgctccatgggtgccgctgtcacatgccgcctcctggtctccaggagggacaccaggtggccttcagctccccttatatagatggtgctggagtaagcattctcgtacctgcccctaacagacctggtaagaatgtccctgggatggatgcctggggacataagcgctgatggtgctggacctcactggactgagtactaccgatatgtctccagagtggcctccctgggccacacccctttgagtggtgcaagactttcctctgtgcccgcatcgctggaaacccttggcttattcacatattttttccccaatattaaaggtgtacagagatactgctttcatttccatctttctggttacaaatgactttgagtaccatgtcataggctgattagcttttcagacttcacttccctgatccgcctgttcacattttcggcctgttttcctattggggttgctgtgttattctggttgacttgcagacattccctcaggtagtctttgcatttttatttttactttattattatttatttatttatttattttgagacagagtctcgctctgtcgcccaggccggagtgcagtggcgcaatctcagctcactgcaacctctgcttcccaggttcaagcaattctcctgcctcagcctctcgagtagctgggactacaggcatgcgccaccatgcctggctaatttttttttatttttagtacggacgcggttttaccatgttagccagggtggtctcgatctcctgacctcacaatctgcccatctcggcttcccaaagtgctgggattacaggcgggagccactatgccccacctacatttttattttttatgtttagagacaggtctcactctgtcacccagactggagtgcagcggtgcgctcatagttcactgcagcctcaaattcctgggctcaagcaatcctgtctcagcctcctgagtagctgggactacaggcatgcaacactttgcctggctaattcttaaaatgttggtagagatgaggtctctctgtttcccaggctggtctcaaacccctggcctccagtgatcctcccaccttggccttccaaagcactgggattacaggtgtgagccactgcacccagaccctcatgtagccttgatcaacactgtctgacagaactttctggatgataaatctgttctcaatctgtgctgccaaatatggtagccactagtcacctgtgggttttgagcacttaaaatgtggctagtgtgaatgaagaactgagttttaaatttcatttaattctaaatcatctaaatttaaaatgaccacacagtgctagggacctctataacaaacagcagttagaagttaacccctgatcaattttttttttatgattctatccactatttaccatgtgctaattcctattctaaatgatttataaatattaactcattcaaaactcacaacaattccataggtagatactattttctccattttattgacgaggaaactgaggctcagagaggttgataactcacccaaggattcacaggaaatgggacaaccagcatctggatgtaaggtttggttcccgaaccacctgctattgcatcttttttttttggacggagtcttgctttgtcgctagactggagtgcagtggcgtgatttcagctcactgcaacctccacctccctggttcaagcaattcccctgcctaagcctcccaagtagctgggattacaggcacgtgacaccattcctggctaattttttgtattttagtagagatggggtttcaccatgttgaccaagatggtctcgatctcctgacctcgtgattcgcctgcctcggcctcccaaagtgctgggattacaggcgtgagccaccgcacctggccccaattgcatctttatttgaacaaatatcttagttttcatgtaatcatgtctttttttgccttagagtttgtgctttacaagttcagtggaggaagtccttctcccttcctgggttcacagctattctccagcattttttttcctttaatgtaaagttctccccactcacagaaggtcctcccaagctccttaaccttctacatggagagcaattcttcattttatttgtcttttaaagtaaaggattgaacaaaaggacatgtttctatttcgggtggtttctgaagccctcttaaagtacagtgttttcttaaataaagaggagtaggaacagaggcaaaaaccccataaggtggtgaggtaagtgattctagaagagacaggagctcgagagggatgagagctctggagaagtcaagaaggggaaattgccgggtgcggtggctcacatcggtagtcctagcactttgggaggctgagacaggaggattgcttgagtccaggagttcaagaccagcctaggcaacaaagtgagacctgtctttaccaaaaatgaagaaattagccatggccgggcgtgctggctcacacctgtaatcccagcattttgggaggctgaggcaggaggactgcttgagcccaagagttcaagaccagcctgggcaacatggtgaaacctggtctctacaagaagtacaaaaattagccaggcatggtggcttgtgcctgtagccccagctactcgggaggctgaggtgggagaatcgcatgagcccgggaggtcaaggctgcagtgagctgtgatcatgctactgcacttggttgacagggtgagaccatgtctcaaaaaaaaaaaaaaaaagaaaaaaaagaaaatcagctgggcacaacgttgcatgtctgtggtcccagctactaaggaggctgaggcaggacgataccttgagctcaggaggttgaggctacagtgagctgtgtttgtgccactgcactcgagcctggtcaacaagagtgaaactctgttcaaaaaaaaagaaaagaaaagaaaaaagaaagaaagagaagaatgggaaacttagtgaaggccagtgcattcacagtcatgagtgttttgaagggtactgttgcgagaccttgccaatcaccagggctagaggaggtggtgaaagagaaaactctccttgagaggctggaatgagaagataatgtgacttgggcaggtggaggcaggatgtcttccaaatagaggtgagaacatagtgtcagtggagatgggagagccaatggatgaatccaattgatggagtgaagctcttgaggaaatgaacaagtgcattacatttgaattcccagacattcagtgggaacctgctacaggagaggcactccaggagcaaaataaaaacaaactctcattcacaggtggtgggagttttaactggtccaaccacttgggaaaactgttaggcagtttcttttccttccttccttccttccttccatcccaaacacttgggaaaactgttgggcagtttcctttccttccttcccttccttccttcctttcttctttttgagatggagtttcatgtattctgccacccaggctggagtacagtagtgcaatctctgctcactgcaacctctgcctcccaggttcaagcaattctcctgcctcagtttcctgagtagctgagattacaggcacacgccaccatgctcggctaatctttgtatttttttgcggagacggggttttgccatgttggccaggggttttgccacattggccaggctggtctcgaactcctgagctcaagtgatttgcccccctcagcctcccaaagtgctgggattacaggcatgagccactgtgcccggccaattgttaggcagttcctaccaaagctaaaccaattcctccctctgactcagatgttccggtcctaggaatatctcccatagaaatatgaagagtggtcacccacagacatatctgagtgtgttcaaagtagctttctctggaatagccccaaagtagaaagcaccaaactgcccaccattagtagagtaaatgaacaggtggttcagcacacacagcgatgagaacaaatgaacagcaacagcacagatgaatctcacacatacaacgtcaagggaaagaagtcaatgcatgcatgctgtatgaccccatgtgcttaaagttcaaaaacaagcaaaactaatctagactgtttgaagtcaggatggagttactggtgacctcagaggcacaagggggtttctaaacgttggtgctgtttttttttccttccttcctttccttccttccttccctccctccttccttcctcgaagctgcagctgttccctccctcccccccttcttcttcttcttcctcctcctcttccctccctattttccttccttcctttttttctttctttagctttctctttctttctctgtcttcctcttttctttctttctctttctttccttttctttctttacctttctctctctctttctgtcttcctcttttctttccttttctctctctccccttccttcccttccctccctccctccctccttccttccttccttccctccctccttcctctctctctctctctctctctctctcttcccctccgcccccattgcccacgctggggagcgatagcatgatctctgctcactgcaacctctgcctcccagattcaagtgattctcctgcctcagcctcactcggctatgttctgtttcttgaactaggcgctggttacatgactgggctcagtttttgaaaatcactcaagctctacttgtatgatacatgtgcttttctgtatgtatgttatattcaataaaaggttaaaaatatatttaggaagtagctaacatttcttgagtgcttgctgtgggccaagtcttatgcattattttattcaatccccatgatgaccctacaagtgtggcggtggtgggtcctatcattccctctactttccaggtcagagaggtggggtcactgcttcgagttcacacagctagcacatggctgggctgggtcttaagcccatgtcctgctcaattctaacttctctgcaatgctctcaggtttggaaaagtaaaaggacaaggatttctcaaagtcagagggtaaaaaggaaaaaaacaaaacaaaacatgagatgatgatcccgccatacaattgcctgctaacttcatcaagaaacagttggaagatctcgaggaccaggtgaaggtttgaagcagggttggggtgaatttaataaagtgttgattaaacgttgtcaggggattctgaagactcagcttaagaggatacctgcaggaaagaaaggaactcttcctgcttcttctcttgaacaattttggctttaacgaccatttccccacaaggcaacaacaaatatttcatagttctactcttccaaagccctgttcacagcatcgtcactgtgggaggtgggcgcctatacccacttcactgataagcaaactgttggggctcagaaaacaataccccaaaatgaagttctccgaagcagccacagaagcaaaagtttttctctgaccttctcctgcccttctatctcttagtcccattctcccctggggctagccacaaaaactagaatccctcttccctaaggcgggtcgtagaaaccagacctcttttccccaaagtcagccctaacacctaaaaatgttactctaactttccctccacctttctttgtaaaaactagttataaaaaaattatctggccagctgtggtagctcatgctgggattacaaatcccgggactttgggaggccgacgtgggtggatcacttgaggtcaggagtttaagaccagcctggccaacatggcaaaacactgtctctactaaaaatacaaaaattagctgggcatggtggcgcgcacctctagtcccagctacttggaaggctgaggcaggagaattgcttgaacccaggaggcagaggctgcagtgagctgagtttgcaccacagcactccagcctgggcaacagagtgagactccatctcaaaaaaaaaaaaaaaaagaaaagaaaaagaaaaagaaaaagaaatgatctggctgggcacagtggctcatgctgggattacaaatcccaggactttgggaggcccaggtggtggatcacttgaggtcagcagtttgagaccagcctggccaacatggtgaaaccctgtctctactaaaaaatacaaaaattagctgggcatggtggtgcttacctgtagtcccagctacttgggaggctgaggcaggagaatcatttgaacccagaaggcagaggctgcagtgagccgagattgtgccactgtactctagcctgggcaacagaatcagactctgtctcaaaaaaaagaaaaaaaaaaaaaagaaattatctaacttacgttatttgaccgtaggttataaggatcccattccagagagggtcctgccccatacccagaaggaatgcatgctctgagagaccaagaagaatcaagacagcccccttattccagagagggtcctgccccatacccggaaggaatgcatgctgagagagaccaaggagaaccaagagagccccccctccattccagagagggtcttgtcccatacccggaagaaatgcatgctcagagagaccaaggagaatcaagacagccctttttgggtttccccactcagtctattagcatttacattgtacactttttgttcaatcatatttctacaccgctgtccatactttgttgaacctaagcttaaaaaacggacaatttcccctgcagctttgggtcttcattctgaaggctctcgtgcaaacacattaaataaatctgcctgccttttctccaattaatatgccttgtgagttgatttttttcagtgaaccttcagagggtcaagcccttggccactacaaaaccaaggttccggaaggccaggtgtcttgtcagaacactcattggttcatttcagagctgaacttgaactaaagctttctgactctactcttccccgtgagggaagcctccatcgcagcaaagcagctcactcaactttcttgcttctcaactgctcctttgcctagagagtctcctccctactgatccacagctctctgtctcccttcaaaactgcctcttgtgctgttttctctcttctccattccataacatgcatgggctcaggttacaccacagctgcgccggcccctagaactttctgggatgatggaaatgttctattctgatctgtccaatatggtagccaagagccacgtgtggctaatgagcatttgaaatggggctcagtggctaaaattttcatttggttaaattttaatgaatgtacatttatatttaaatagcctcgtgtggctagtggctatcctgctgtaccatgcagctctgcagttgaattatagagtggattacataatcgagggcgtgcagtccgtcacatgatggtgcaaactagtcattccctgtgtgccctctaggtcaatgctccagcgggctctgtgccctcgaggcggacccttgaagactacaactcccagaatgctttgctccgtttccggtttggtttggctgaggggaagcgctggcagaagatgaggggagggaaagagattggaatattgcttccctgctccctccctggttctgacagtagtcccttctgcacagctctgcctccactgggttccaggaaatgtagggctcgcgatggcttctctctgaggacctcaaacagccgttatctatttctctcacctgttcctatctctttaaggagtctcttcatggcatggtcttcttttgaaccatctagaagttaattctttttcctgttaggaccctgattggtatgaggtgggaggaatgaatggttcatgaaagctgcccacctgaagaccttgaagtccccccagtttctgaggtcaaagtctggagaagcaggatttgattctagatttccctacctcaagagggagggatgctctactgctttttttcaaataagacttcaaattgtggggagagacattcttccagattcttgcttcaccccattgtaaggcaaaggcaaatcctgagagctggaagcccaagaaacagaggaggtgggtggaagaactcaggagtgtcccttaaaactgtcctaagggtggaagaagataggaatgtcccttaaaattgtcctaaggtagggcttgcaaggaggtgacacagatcaaaatgtgaagcttgattctcagtgaggacccacgcagagactgatgtctgtctctccttcctggatgctcagttagactccgtttcccagctctgcaagtgggcgccgccatgtacgctctggtgacatcgatcaaaatgtggagcttgattctcagtgaggacccacgcaaagactcatgtctgtctctccttcctggatgctcagttagactccatttcccagctctgcaagtgggtgccgccatgtaagctctagccagtgggaggtagatggaagtcatatggactacttctgggtctgtcccagaaacatttctcctgtgcccttctcatgctcttttcccttctgtggcttgatatcaagaagcatggagactttggaagccatgggttgaagatgaggagctacaatatggaacaagcctgggcccctgacttactgcttagaggagaggtgcctgctgtttaagaatacattttttttttggccaggcacggtggctcacggctgtaatcccagcactttgggaggccgaggcaggtgggtcacctgaggtcaggagtttaagaccagcctgaccaacatggtgaaaccccacctatactaaaaatacaaaaaattagccaggtgtggtggcgggcacctgtaattccagctactggggaggctgagtcaggagaatgcttgaacccaggaggtggaggttgcagtgagccgagactgggccattgcactcatgcctggaggataagagcaaaactccgtcgcaaaagaaaaaaaaaaaaagaatacaccttttgaactttatctgtgcaagaacgaaatttttattgttttgagcccttatgcatgttgggattctttgttacagctgcaagcatatctaatacacttaataggaacttataaacagtaactaatacacttgggcaggtaaattgtcagtttcatgagaccatggatttgcctctttggttcactgatggatctctggtgtctagaacagggctgagcaggtggaagggttcaataagtgtttgttgaatgagctatcagcttccaatttttctttgcagctgactggaaagcagagaagtatagtagatgcaagctctggctcccaggtgggaaagggttgggtttatatcctgcctgattatttactaattgtctacattgggcaattgccaagcctcagtttcctcatagggaggttggagaattatataaaagctctttctttttgtggacagagtgaggattcaacgtgatcattcatgagaagtgctgagcacaccacctgatgcatagtaagtgctcaggaagtagcggtcatgattatctggacttttctcattctctgggcaaacaaaaagcacagaagctgcccctgcaataggctctgacaaatttcaggccccgaggggagggaggccaggcttgagcctgggattatagccaaagaccagctcaggaaacaatattacattcccatgatcctcctgcgatcccaggagggcttgagcctctgtttcttgtcctgacctcagactaactctgcagaaatgctgctcggggcttggactagctgctctggttcagggagccccattgagacctggaacttagagggcctggtggagtcctcaagactaatgtggggaatgagccatagtttaattcaggacaccccacttttttcaagtattattattatcaccagcctggagttatgcgtgattgggcagatgccttaggactgatcaggtttttctcctccattaattaaaatgtgaatcacagctgagtcactaaagaaaacggttaatgagcaattctgacttcctccctccttccttgctcagagagatgagtcagcagaagtccagatccaaaaatgagaagaagaagaagaagaagaagaagaaggagagaaaaggaaaaaaaaaaaagcccagaagagatgtagggcttgggaaagcaggagcaaaatgaacctgaaccatattattctttgtcttagcagaaaaaagttcccaaatcgctatcccaaggcctaacggtcaaatcctctaatgagcacgaccagttctcatttttacagacagacccacaggcacccagagatggatccaagccccagcaatctcctttcttgctttcctcaagcaacgacaggctcctcaccatgccaaaaacaaccaccaacctccacctttctttttctgcttcgttttccccacaaagcccaggctctcctttgaattcagacatcatggtcatgtttcataagataagggacgagtgaggagctggggtgcctccggtcaataggaaagggccatggggagtaacagtagaagatttcagaagtggggaggtccctcagaatcagggaagctacgtaactcaaaacatgattcctggagccaggctaagcctggatcctggcttcgtgtagagctaatcaatctttctgagcctcagttgtctcatctgtaaaatggggagagtaaaaatacctacgcagtgttgcaaagatgaaaaagtcagcacccatcagaagttaacaattataatattcattagaaaactatgatccaagaatttctgcctcacccatagggtcaccccaaagcaagatgatcagacaggttggggagatggtcctcactgagcactggcacacacacttgaacaggtgtgtgtgtgtgggtgtgcaagctctcatgtgtgtgcatgcaatttcccctcccaaatcaactgatcatgtataacactgcacattcgacttttgacttttgcaggatgaattttcatgatgcctatttatattttcaaattatgagcaggggctttcaccaattacccctgtcttgaccccttgttattcaaatgattctcttttgaagagcctgcagtgtcccagtccttgtcaatttttaactagatgaatactgtccagatcccatctgctaatgtctgggggtgtgatttcagcagcttgccaccatcatgctcactgactttaagaaatcttctattttttgcaaggttggtaatttctaagtcagtttgccttggacttgtgctagagtgtaagataatatttaacaatctagaacagtgactctcaaccaggggtgatttcacctcccaggggacatttggcaatgtgtggagacatttttggttctcacaactggggcgcgggcgctactggcatcaagtaagttgaggcagtgcacaggatagctcccattttggagctaataatgcagcccccaaagtcatcagtgctgtggcggagaaactctgacctagaacccagggggccatggcggtcctgaggcagagtcttgctctgtcattcaagttggagtaaagtggcgtgatctttgctcactgcaacctccacctcccaggttcaaacgattctcctgcctcagcctcctgagtagctggaattacaggcacccaccgccacacccagctaatttttctatttttttagagacagggttttgccatgttggccaggctggtcttgaaatcctgacctcaggtgatctgcccgcctcagcctcccaaagtcctggaattacagacctgagccactgttgcctgtccaggactcacttttacaagtagtcaattcagtcagttccttagggaccaaaaaatggattatgccaattttagggtccttctgcctctttctaaactacaatgaatttatactaagcgtggggctctgcagccagatttcctggattcaaattccaactctgccacttcctagctgtgtgaccttgggcaagatatttaacggctctgggtttccatgttctcactaatacatgtgaccaataaagcacccactgagtagttgtttgcattaggtaggctgatatgtaaagtacttacgacagtgcctgatacatagttgaggcatgagtgggaggtagactgaatccctggtgcaaacatggtgagcttcccactaaagattcacaagtgggactgggaaatggcagcctaatcagagactacatttcccagcctcccatgcagctagcctgggccacatgactaaattccacccaatagaatgcaggcagaagtgttgttcaccacttccaggaaccctcataagtacctcccactccactttcccttttccccagctgctgtctcaatgtaggctcttagaacaaccttggaagccacatgtttaagcagggagagcctccaacagcctggatccctgagtgactgcatggagtcgagccatatttgagtcacccaccactccacctcattgcacccctcaccagtttcactttattattttttatttttagtagagatggtgtctcactgtgttgcccaggttggcgttaaactactggggtcaagcgaccctcccaccacagcctcccaaagtgctagaattacaggcataagccaccacatccggccaccagttgtactttagaagttgatttctcactcatgcatactcttaagccagagatttttggttttattggttattgcagctggtgttaactaacacagcctcttcttccagcattgctttgtctctcttgatcagcaaatattatcatctcttcaacatctgaccagcttcaagacaactacagtcctctccttcatacctttcctatgagttggcaaataagctggggaagaagccccttctcccattggggatgaggaaagggaataggttccctaggccaggatcttagtaaagatctttgatacagaaacaagaagggatctgggagtcatgaccactcagcatctcaggccaaagaatgtgggtgagtaaaataatggtacaatggactttagagacttggggggaagagtaggaggtgagcactggataacagacaacaaatatggtgcagtgtatactgcccgggtgatgggtgcaccaggttctcacaaatctccactgaagaacttactcatgcaaccaaataccacctgtaccccaataacttatggaaaaataaaattaaaaaaaagaaaaaagaaaattaagcaaataaaaataatcaaaatctaaagaaaaccccaaaacctaacaatttctgaaaaaatagtatgtgggtatctgtttattaataaaacattcaattataatttcaacatcaattaattgatcagcataaataaatggaccaaatttcatatatatatatacatatatatacacatatatatacacacatatatatacatatatatacatatatatacatatatacacacatatatatatacatatatacacacatatatatacatatatatacacatatatatatacacacacacacacacatatatatatatatatatatatatatatatatatatatatatacttgcaagtgaaactcaaactcatattagtaccatcaaacagtagcaatatgtgccgacatctagatcgtctgctcaaatatcactttcccaataaggcctaccctgaccaccctattcaatgctgtatcttgcaccccagaaagtggcagggccaggacttgagcacagcactcccaaattccctttacccgactttactgattttcccacctgcgaacacaccatcgttaatgtttagggttctcaccctcccccacctcactacctcataagaaccagagggtctcctcatcacctagaatagtcatgggtacacagtagatgctaaataaatgttgatctgagtgaagtgttgttctttgcctgggacattctaagaggtttatacatatgaactcatttgcatgctcaaagcagtttgaccaagtgatgagtttaaaaaaattatctccattttatagataaagaaagacaggttcagagagagcactcaggcagaagtggaagagccaggatttgaacccagactgtctggtccctgggtctaggagctccagacactgctttgtctaggcccacaacacagagtcaacaaacccgggacaagtgtgaggggaacccaaaccagaggtgttcattcagtttttgtttgaaaaatacacaccatgttgcgtatgggtgtggatagggccaggctcacaagattgtgcttggcgacctttataaggagggaggacctgggtgcagtggctcatgcctgtaatcccagcatgttggaaggccgaggtggggggattgcttgaacctaggagttctagaccagcctgggtaatataaggagaccccatctctgcaaacaaacaaacaaacaaacaaaaaaaaactttaaattagctgggcatggtggtatgcacctgtggtcctagctacttgagaggctgaggtgggaggatagcttgaacctggaggttgaggttgtaatgagccgtggtcatgccactgctctccagcctgggtgacagagcaagaatgcatcccaaaaagaaaaaaaaagttggtacatatggtacaatggtacatatgttcaaatcttggcctcaccactctccagctgtgtgatcttggggcagtaacgtaacctctctgtgcctcaagtcttatttataaaatgggttgttgggaggataaaatacattgacatttgtaaagtgctcagaacaggttcataggcacacatatgcacatatgtgcatatatatatatacacatatacacacacacacacacagtaataaggttcatagttaatgctgctatatatgtttctgttaaggaaataatggtcacagcttccacccggagctcaggagcgtggagcaggccacctgagagcagagccaatccctgcactgtattcagcctcatgccacctggggaacagtgtgttccagtcaaaagagctaacagcgaccttccaacagctcctgctaattttaaggacaagcctctcagtgctggcgctggagtcaattgttgctttttcaacaacagcaccaggtgtgtgttaagaggcgtgccatcaggaaggcatcctctcccgagaaagctggaagtggcaagtggcccaggctgccctgaacaggacagaaaatggttcagagcaaagctgaggtaggcagggagaaaagataccagggccgtatcctctgtgtcctccccctgccaggcagaataatctggcattgcttaaatatggtacaagtcccgtgatgtttccagcctgcaaagcacctacagctccaaagtgctttccagaaatgagctaactaatccccaggggtgggtcatgatgctaaacgtgaaccatccctgaggggaaaggtgtggaagagtgttattccaagaaaacaggcaaaactgcagggcaaggagtgagagactgttagtaagaatgatgataaaaatgatattattattattactcatattattatttgagatggagtctcactgtgtcacctaggctggagtgcagtggtgtgatctcggctcactgcaacttccacctcccgggttcaagcgattctcctgcctcagcctcctgagtggctgggattacaggcaccccgccaccacacccggctaatttttgtgtttttagtagatggggtttcaccatgttggccaggctggtctcaaactcctgacctcaagtgatctgcccgccttggcctcccaaagtgctgggattacaggtatgagccagcgcgcccggccattattattatttttgagatagggtctcactctgttgccctggctggagtgcagtggtgtgatcacagctcactgtagcctcaacttcctgggctcaagcaatcctcccacctcagcctcccaagtagctggaactacaggtatgcaccaccatacctggctaattatttgtatttttatttttattttttgtaaagacagagtctccctatgttacccaggctggcctcgaactcccgtgctcaagcaatcagcctgcttctgcctcctaaagtgctgggattacaggtgtgagccattgctcctggccatattattggtagtagtattgcattattatcaacagtctgtaatatttcttgagcgcttacaaggagccggatactgttctaagagctgtatgtcaattatttcaataaatcctccataactgtatgaagtaagagtgttattatccccattgaacagatgaaacaaatgaggcccacagaggtttgggcatcagctccaagtcacacagcttgcaagaaggggagctggttcaagcccaggtattctgataacatagcatctctatcatcctcaccattataatgatgttctgtatatttcacagtatttgctggggttggctactgttgacgccattttacagatgagaaaactgagttatagagggacttgctgactggcccagggtcacatagctgagaggtggcagagtcagaatgcatccattcatgtggtctcagcagccacatcagcaccaatgggacttcgatattgcctggatggtcttccctctttccatatgccagctttatggagaacagagtctggacagatgcagtggctcacacctgtaatcctagcattttgggaggctgaggagggaggatcgcttgaggccaggagtttaagacctgcctggtcaacatagtgaaaccacatctctataaaaaaaggtaatataaaaaggacgggcatggtggctcatgcctgtaatactagcactttgggaggctgaggcagactgatcacttgagcccaggagctcaagaccagcctggccaacataggtgaatccctgtctctactaaaaatatagaattagccaggtgtggtggcgggtgcctgtaatcgcagctacttgggagtctgaggaacaagagttgcttgaacctgggaggtggaggttgcagtgagccaagatcgcgacaatgggcttcagcctgggtgacagagggagactctgtctcaaaaaaaaaattatatatatatatatatatatatatatatatatatatatatatatatgaagggaatctgatccctaacattagtggaacagcttcaattcagggattgagcaggaggagaggctggtgcattcagtgtccactccccagcatcagagtggattctacccagcttggtgagaattctctgtacccaatttgccctttgatactgcactgggcagagagggtgggtgggcatcctcctactagggcaggaggagtccttcacatatacctgtattctgggccatcacccttcagccagagtcatccttctaaataaaaagctaagcacaaccaccccttgtctaaatccttccatggctcccttgtgccttcaggataaagtccaaactcctcaaaacatgggttggttcctgctgaccttctgtaggttcttctcttgccatttccctctcccaacacacaagcacattcacacacacacaaacacacacacacatgcacacatgtatgcatgtgtacacacatacccacacacaagcacagctctgtttacctgtttcctgtataaaccctatgatgtggaatcccagctctgctacctgggcaagtcacttaacttctccatgcctcatttttctcgtcagtaaaatattttgctctcctgtgcttctctagactagaagaatgcctgacacacaaaatgcaccaaatggtcattttctgtttggttttgtgaaagacaaaacgcgtagacagtacaaaattcagaaagacacaagaaagtaagtttcctttccacacctacttccaaatctttcagggtgccgctacagaggcaaacacaattattaatttctcatggaatcttccagatttgctcttacgagaaaatggcggcaccattcaaaaactgcttttgtcacctgataacatatcttggatatagagattcctatttccttctctgtaaaatggggatatgaaagaatccacctcacaggcttgttacaagaattaaatgagttaatactcactttctaacagcacttgtatacagtagacaccctataagtactagctcttattgacactcagagatctgcttcttctttttgtaatgacttcataacacgctaagggatgggtgtaccatagtttatccgacagttcttgttgatggagacgtccatcaatggagtcttccaattgttatgctgcaacaatgcttctctttgctgtaacaatgcttaataaatatggttcacgtctgtaatcctagcactttgggaggccaaggcaggcagattgcttgagctcaggagttagagaccagcctgggtgatatggtttggctctgtgtccccacccagatctcatgttgaattgtaatccccaatgttgggggagggacctggtaggaggtgattggatcctgggagcagatttcccccttgcttttctcatgacagtgagtgagttctcgtgagacctggttttgtagcactccccccctcactctctctctcctgccaccatgtgaagatgtgcttgtttccccttcattttccgccatgattgcaagtttcctgtggcctcctcagccatgccttccgcacagcctgtggagccgtgagtcaattaaacctcttttctttataaactactcagtctcaggtagttctttatagcaatgtgagaacaaacgaatacactgggcaacatggcaaaaccccgtctctacaaaaattacaagaattagcctggcgtggtggcttgtacctgtggtgtcccagctactcaggaagctgaggtgggaggactgcttgagatggggaggttgaggctgcagtgagccacgatcttgccactgcactctagcctgggcaacagagtgagaccccgtttcaaaaatatatatgtggtgaaacaaaagaactaatgaatgaagaaataaatggaggaatactttgagcagggtataaggaacctgggtaagtttcagagattccaagatcttcaaaggtacctttctaggcactaagtccttttacaaattcctttcatgtggcactaacattatatgttcaatacaccagcatgatcagattataccactgtgtgtggggtgctagggccattctttgatggagaactggtctacccattgcaatcattctcacagatgcaagctgagctggttcacaggtgagcaactgttcttgccccaaagaatgtagttaatgttcttcccataagctcatggcttttgagaatactgttggtcccaaaggggagacagtagttggtcaaaggaataccacctcagcccaggaaggggactgtgtactgaaggaacagtaaggtgtccttgaggggtttgaagggttcctggtgaggctcgattgtgttgtaggatgaaggctgaagagtggggtgggaggcagggacgaggaaggagatgggtcatgagctctattaaaatgtatttttgtaattccgagttgaaaatagacataccgacttcatgctgactgtttcggcttcgtgacatagcctggctcgtgggggccttcccattcagcacgtctccgtggcaacaggccactttctcattcacgccatctccagggttaccttgcttggctcattcaggactgttgccatagagacaggtccattgatacaatcttgacgctttggaactttgctttcccgaatgatggagtattggccgtggggtacggatgacattgtgatagggtgtgaggcgaagagagttctgggagttgaggtataaagacttaaaatctggcaagaggaagatgaggtcatggtaggagatatggtaaggcagtagtagaccaatatcattcctgatcttgacatgtgaaatggttgatcctttgacaatcctgtgtgtgtgtgtgtgtgtgttgtgtgtctgtgtgatgtcttttattagactcaaagtacaaatacgccaggcacttagccttgtcattgttgatgtctgtatctccagcatctagcacagcgcctggtacaaagtaaatgtctcctcaaataataataagaagaagaagaataagaatttctttttgaggcagggtcttattctatcacccaggctggagtgcagtggctcgctcttggctcactgcaacctccaccttcagggctcaaatgatcctcccgttttagcctcccgaatagctgggactacgtgcatgccactatacctggctagtttttgtattttgtgtagagacagtgttttgccatgttgcttaggctgatctcgaactcctgattcaagctcagaagtgaatcaggagttcaagcaatcctcccaccttggcttcccaaagtgctaggattacaggcatgcaccactgcactcggtctacccacaaataattattgaataaattagaacttgttgtttgcagtaaactgtaaaaatataaattgtccttgataaaccataaaaatataaaaacattagaagagaatttccacaagcaaccaccactattatttactctctacctcccagcatgtatgcccatatagtgcattttctcctgtttctatagataactgtgtgtgctgtcatctaaagtgaaaccttccacctgtacaccaaatgccatcccctctcgtccaccaagagatgtcctcctgacactcttcttcctccagcatcctcatgtttttctcccctaataggttattcctatcagcataaaatctgctgttaggtctcccatcttttttttttgagacagggtcttgctctgttgtccagcctggagtgcagtggtgtgatcatagctcactgcagcctcgacctcccaggctcaagagatcctctcacctcagcctcccaagtagctaggaccacaggcatgcaccaccatgcccagctaattaaaaaaaaattttttttgtagagatggggtctcactatgttgtccaggctagtctcaaattcccgaggtctcagcctcccaaaatgctgggattacaggtgtgagtcattgtgcctggccttttttttttctttattcttttttctttttttttttttttttaagggaaacaaacctctgaaatccacttcccccaccagctaacacatgccccatctctcttcctctacccttcacagcagaactctttaaaagagctagtagtaatccttccagtagcctcttgccttcacctcttcacctaagcagctctggctcaggtcacgaaagatctccatgccactacatccaatggttgattctcatttttcatttgagtcaacacatcagcatcagtggacatcattgatcattccctcatacttgaaatggcttagcactttccttgcatgacagccagcacccacattcttctgatttgctccaattcagtcttctctgctggctcctcctcatcttccccaacctctttaatgatggagagtaagccctgggctcagtcctgggtgctctcctgcatctatgcccttattcagttccttaaatagcctccacaggaggctgactcctgcctttggatctccagctctgacttaccttttttgaattttagactccaattcctattaggctggtgcaaaggttatttcctttgccattacttttaatggcaaaaccgcaattacttttgcaccaacctaatagatggccaacacaatatctctatccatcagtaggcacttcatagaaagctgagttcctaatctgcccacctagtcagtctccttccccattttatttgatggcaaacccatcctttcacttgcccatgtgatagggtttggctgtgttcccacccaaatctcaacttgaattgtaataatccccacgtgtcaagggcggcgccaggtggagataactgaatcatgggggcagtttcccccatactgttcttgtggtagtgaataagtctcatgagatctgatggttttataaatggcacaagctctcttgcctgctgccatgtaagacatgcctttacttctcctttgccttctgccatggttgtgaggcctccccagccatgtggaactgtgagtgcattaaacctctttcctttataaattacccagtctcaggtatgtctttattagcagtgtgagaagagactaatacaccatgtcaaaaaatgtggggttctccttgacttccctctctctctttctctctctttctccttctctctctctctctctctccccattctcctttttgagacagggtctcactttgtctcccaggctgaagcacaatggtgcaactacagctcactacagcctcaactttctgggctcaaatgatcctcctgcttcactgtcctgagtagctgggattacagggacacatcaccctgcctggctaatttaaaaatttttttttgtagagacaggggtctcactatgttgcccaggctggtgtcaaactcctgggctcaagcggccttccccacttggcctcctaaagtgctgggattacaggtgtgacccaccgtgcctggcctctctctttctcttaaagttcatactcagttgagtctgcaaatctaaaattaagtcaacacagatagtgaaaccaaccacccctccccacctccatgaccacagccctgacttgaggcctccgttactgcttgctcagaacattgcagacaactcccaaatgagatccttgtttccacgccgcctccagtgtattcttttttagatgttttatttgttttcttttgcagaaaagaggtctcactgtgttgcccaggctagacttgaactcctgggctcaagcgatatcctcctgccttggcctcctgagtatctgggactgcagccatgtgccactctgcacccagcaattccttagcattgacaagcatatggtgataatataagatacaaacaacaggagaaactgggtgaagggtatgtgggaactctttataatatatttataacctttcttttttttcttttcttttttttttttgagatggagtctcactctgtcacccaggctggagtgcagtggcgcgatctcagctcactgcaacctccgcctcctgggttcaagcaattctcctgcctcagcctcccgagtagctgagactacaggcgcgtgccaccatacctgactaatttcgtattttcagtagagacggggtttcaccatgttgcccaggctggtctcaaacgcccaacctcaggtgatctacctgtctcggcctcccaaagtgctgggattacaggcgttagccactgcgcccagctacaacctttctaaaagtctaaattactctaaaataaatatttaaaaaataacatttgtttggtagaaagggtccactgatttaaaaagatttgaagactactttggtaggcatttctgaagtgggacatgttatggtgtgacttaaatattaggacaaaatggtgtggttggaagttcagaaagtgggttaggaccaggtgtgggggctcacgcctgtaatcccaaggctttgggaggcacaggcaagaggactgcttgagcctagaagcttgagaccagcctgggcaacctagcaagaatccatctctacaaaaagttttttgttttttttttttgttttttttttagatggtgtctcgcgctctgtcgcccaggctggagtgcagtggcgtgatctcagctcactgcaagctccgcctcccaggttcacaccattctcctgcctcagcctcccgagtagctgggactacaggcgcccgccaccatacctggctaattttttgtattttcagtagagatggggtttcactgtgttagccaggatggtctcaatctcctgacctcgtgatccgcccgccttggcctcccaaagtgctgggattacaggtgtgagccaccgtgcccggcctacaaaaagttttaaaaattagccagtgtggtggcacatgcctgtagtcccagctactagggaggccaaggcaagaggatcccttgagcccaggaggtcacggctgcagaaagtgattatagtgccactgcactctggcctgagtgacagagcaaggtcctgtcttaaaaaaaaaaaaaaaaaaaaaaaaggccaggcacagtggctcacacctgttaatcccaacactttgggaggctgaggtgggaggatcacctgaggtcaggagttcaagaccagcccggccaacatagcgaaaccccgtctctactaaaaaaaaaaaaaaaattgccgggtgtggtgccaggtacctgtaatctcagctactcgggaggctgagacaggagaattgcttgaacccaggaggtggaggttgcagtgagctaagatcttgccattgcacttcagtctgggtgacagagccagactctgtcaagaaagaaagaaagaaaaagaaagaaagaaagaaagaaagaaagaaagaaagaaagaaagaaagaaaaggaaggcaagggaagggaaaggaaataaaagaaaagaaaggaaggatggaagagtggaaggtgagataaaagcagatagaagcctgggcaacatagtgggaccccatctctacaaaaaatacaaaaattagccaggtgtgttggtgcccgtctgtagtcccagctactcaggaggctgaagtgggaggatccttgagccaaggaaaaaattgaaactgcaatgaactttgagtccgggagtttgagaccagcctgggcaacatagggagactccttctctataaaaataaataaaaataaattagccaagcatgatggtgcatgcctgtggtcccagctactcagaaggctgaggcaggaggattgcttgagcccaagaagtcgaggctgcagagtaagctgtgattgcgccactgcactccagcctaggcaatagagcgaggctctgtctcaaaaaaaaagcaggcagatagcagcgaaggacaatgtgccacattaaggagcttggatagtatcttgaaagcaataagggtttaaaaaccagggaatgttggagacacgtggcacaagaaaggtgtcatctagatggacagaagaccctcatgatcccatgacagcgactgggaaggggtaattaaaaacaaagaaacacaagccaaaagcatcatcaggctgagaagagaaaatgtcttagcatggctgagaacacactcaagaaatagaagctctgccgggtgtggtggctcatgtctgtagtcccagcactttgagagaccaaagtgggcggatcgcttgagcccaggagttagagaccagcctgggcaacacggcgaaactccatttctaccaaaagtcctaaaaaaaatttgcccgggtgtggtggcgtgtgcctgtagtcccagctattccagaggctgaggggggaggatcgcctgagcctgggaggtcaaggctacagtgagctgagatcacacctctgcactcgagcctgggtgaaaaagagagatcctgtctcaaaacaaaagcaaaacaaacaacaacaacaacagaagagaagttctgagatgcccatgtaggacagctggttactcattgggggactttcccaaagcgattttggggaaggtaggaactactgggatgaggagggcataggagatgggctgtattcccagggagcttaaaggagtcagggcagaggcttcagagtaggaatcagggcaggatttgggggatggaagatcctgtcttcctccgagacagagagaaggcgggtgtgtgtgcggcgcggaatagaggcaggtggtgccgacaaggaaacgtgcggaaggaagggagatagacgcaatccctgcatatttttctcagcccattctgtgctcttcacaacacgcctgcctttatgacctgggggacagggtgagaggcttctgcatgtcagagctagactgagaggatgttcctcccttgtcttcagagctgagtgggtcataacatttagaactagatgaggccaggcgtggtggctcacacctgtaatcccagcactttgggaggccgaggcgggaggatcactcaaggttgggagtttgagaccagcctggccaacatggcaaaacccggtctctactgaaaacacaaaaattacccaggcatggtggtgcacgcctgtagtcccagctactggggaggatgaggcagagaattgcttgaacctgggaggcggaggttacagtgagccaagatcatgccactgcactccagcctggtcaacagagcgagactctgtctcaattaaaaaaaaaaaaaaaaaaaaaaaaaaaaaagtagatggggcctcagaattcactgaggccaatttcctgatttaacaatgaagagaaaactccagagggactgagggagctgtccaaggtcacctagcaagtgagggacagatctgggatcagaagaccagtctctcaccagctggcctgtgtcttctactgcactgtgctggtccccacaggcctctgagcggtcctctctgatgaagcttcctacgctgataaaaatattctctatccatgctgtccaatatgatagccaccacccacaagggatgattaagcacttgaagtgcagcctgtgtgagtgagaaacagaattttaaatttcgcttaattttttttgagacaaggtcttgctctttcacccatgctggagtgcagtggcacaatcacagctcactgcagccttgacctcttgggctcaagcgatcctcctgcctcatcctcccgagtagctgggaccacaggcctgcaccaccacgcctggctaatttatttttattttttatagagatggggtcttcctatgttgcccaggctggtctcaaactcctgggctcaagcaatcctctggcctcagcttaccaaagtgttgggattacaggcgtgaggcacagcatttaggctgtgtgcggtggctcatgcctgtaatcctagcacttcgggaggccgaggcggtggatcacctgagatcaggaattcgggaccagcctagccaacatggtgaaaccctgtctctactaaaactacaaaaatcggccgggcgcggtggctcacacctgtaatcccagcactttgggaggctgaggcgggtggatcacaaggtcaggagttcgagacaagcctggccgacatggtaaaacctcatctctactaaaaatacaaaaaattagctgggcgtgttggcgggcgcctgtaatcccagctactcaggaggctgaggcaagagaatcacttgaatccaggaggcggaggtggcagtgagctgagatcgcgccactgcactccagcccaggcaacagtgctacactccatctcaaaaaacaaaaacaaacaaacaaatttaaaaaatccaaaaattagctgggtatggtggtgcatgcctgtagctacttgggaggctgaggcaggaggattgttgtgtatattttgccacaatcaaaacaaaacaaaacccaaaaccaatttaatatccacatacggatattaatatccaaatacgtgcaattggtgaccgaattgcacggtacagctcaaagaatgtttccaagaatggcttttgatgaccacctcaaagctcacagtctttccagagagaccgtcaccctctccccaagggggcagcctgatgttccaggaggtggcagccactcgtccaggtcagaaagcgactgccaagaactcactggaccttggaagtcagccagctgccaatctgtcagcttgcatccggagggctggagaagaagcgctgtgttaactgtgcaactctgtgctgctgtgcacgctcggtatgtgggtcccgaggggtttccactccactgggcaggaacagggagggaaggctgtcatgtttcggtttctgaatgtccagctgctgtgacagcaggaaagagtcgccaagggctgagactggtgggtgggctggctccccagatagaacaatccacccagagcccattctgtaggtagtgaggcagcctccatcaaaccagtcgtggattctctgtttctgtagagctctgcctgtttatgcctcactttctggggatgaactggcctgggcttctgcaataatttcagcacaaggagttaaaagagaaccatagttgcccagtgtggtggctcatgcctgtaatcccagcactttgggagaccgaggcgggtggatcacaacaaggtcaggagatcgagaccagcctggcccacatggtgaaaccccatctctactaaaaatacaaaaattagctgggcgtggtggtgtgtgcctataatcccagatatttgggaggctgaggcaggagaatcgcttgaacccgggaggtggaggttgctgtgagctaagattgcactactgcactccagcctgggtgacagagcaagactccatctcaaaaaaaaaaaaaaaaaaagagaaccatagcatcttccaccaagacacagacctccatggccagccctgtcccctgtcaagagctctcccggccccatgttcttttccttcctggcggttagcacagtagatgctcaaaaaggtatctgtgacaatatttgtgttgcaaatgatgtcaaaactgtgcaaaaccatgttggtttgaatcctggctctgccacttactgttcctcctcaggtgagttacttaaccccactctgtcttgatttctctgtggttttccccatagagagaagacatttgttaatgtatgaaaagtccttagaacaatggaatgaagcttccatgaagtcagctttctcaggtccacagcaaatatttgggggagtggaggtgggggcagaacccttcaggcattcagtacaaggtagtggtgtgtgtacgtgggaggcagtcccagatgtcagaacctgaattcaaagcgcattctggctgtagtgggttgaacagtgaaccctccagaagttatgttgatgtcctaatccctggaatgctaccttatttagaaaaaataaggtatgcaggtacgatttagttaagaatatgagggcaagagtttattcctggattttctgagtggggcctaaatgcagtcatatgtatccttatgacacagcagaagagggaactttgagagggaagaggagaacgccctgtcaccactgaggcagagactggagtgaagcaactccaaatccaatggaaggatcctcccccggatcctttggagggaccctggtgacacctcgatttcagacctatggcctccaaaacagtgagagaatacatttcccttgtttgaagccgtgtggtttatggtacagtcatgtgctacataacgatgttttgatatgttttgatcaacagcggactgcctatacaatggtggtcccatatggttataactgtatttttactgtaccttttctgtttagatatgttttttattttttatttttttgagatggagttttgctctgtcacccaggctggagtgcagtggcatgatctcagctcactgcaacctccacctcccaggttcaagcgattctcctgcctcagcctcccgaatagctgggattacaggtgcctgccaccacacctggctaatttttgcatttttcagtaaagaaggagtttcgccatgttggccaggctgggctcgaactcctgacctcaggtgatctggaattacaggcgtgagccaccgtgcccggcctagatatgtttagatacacaaatacttaccattgtgttacaactgcctacagtattcaagacagtaacctgctgtgcaggtttgcagcctaggtgcaatagggtatgccccataactgaggtgtgcagtagtttataccatctaggtttgtgttaagttctctacatgatgtccacacaatgacaaaatcgcctattgactcagttcttagactatatttccaaggctggaaacagtggctcatatctgtaatcccagcactttgggaggttaaggtgggaggctcttttgagcccaggagtttgagaccagcctttggtaacatagggagaccccacctctacaagaaatttaaaaattagccaggtgtggtggcatgcatctgtggttccagctactctggaggctgaggtgggaggatcgcttgaacccaggtggtcgaggctgcagtgagctgttatcaggccactgcactccagcctgggtaacagagtgagaccttgtctcaaaagataaaaagtatcccccaggacaatgtcagttaaacaagatctgtagattttgttatctaattagacccaggatagaatggatgtgggacaagtaagaatgctgttaaaatgaagaaaatcctggccgggcatggtggctcatgcctgtaatcccagcactttgggaggccgaggtgggtggaccacttgaggtcaggagttcgagaccagcctggccaacatggtgaaaccctgtttctattaaaaatacaaaaattagctgggtatggtggcggacacctgtactcctagccactcaggagactgaggcaggagaatcacttgtatctggaaggtagaggttgcagtgagccgagactactacactccagcctgggcgacagagcgggactctatctcaacataaaaataaaaataaattaaaaaatagagaaatgattaaaaaagagactgctgttgactttggaatttttgggcaggggtcagcaaaccccatgggctggccatctatttttataaagttatgtggaattcagctgcatccattcattgacctattgcacagaaaggctcgctctctctctcaagcagaaggaggctcacttcatggtctcttttcttaagtaaagcagtgaattgagttgaatactatttcccccaaattcgtgtttaccgaaacctcagaatgcaatcttgttttgaaataagctctttgcagatgtaactaattaaggatcttgaggtgagatcatcctggatttagagtaagccctaaattcaatgactggtatccttctaagaagaggaaaggacatagacacacagagaaaaaaggcaaatgaagatggaggcagagattgaagtggatgccagacaaagaataccaagggttgccaggagccaccagaagaggcaaggaagaattctttcctagagcagttgtcaaggtggctctgctgacaccttgattttaggcttctagcctccagaactaagagaaaataaatttctgttgttttaagccgccaagttcatgttactctgttataacagccctagaaagccaatatagggagagaaagatgaggtgacatgcctttgcccctgatttaatacttcagttaattctggaaaagaaccccttatcagataggtcctgtttgacaatttgattcaataaatatggtagcaaccactggatgtccaccactcccccatcccccaccatcttctacagtaatggaattttagccaagtcatggagttcccaacaaaactacatttcccagcatccctagcagtttggtatgatcacatgattaagtttccatcagtgatatgtcagtggaagtgacagctgccacttttgggtctgagacttcagaaattcaaggtctgcctattcaagaccagttaagttttgattgtgcaaatggtgctgaagatcatttggtggtagaaaagaagagggcaacaggagcctgaatccctgagtgactttgtggaagtgagcttccctgccaacctgcatggctaaccttgcagctattataggagagaaattatttttttttctttaaggttttaatccggtggccttttgggtctcttagtatggcagcatacctttgctacataatataataaatattaattatgtacccaggaagttgtagtcatgggggataggacaatgactggatgggtagggccctgctctcatggagcttacaatctaagggaaggaaagcagataatttaaacctcaattataatacagggggataaaaaacctggtggaagagcactgctatggtctgaatgtctgtgtctttctcaaattcatatgttgaaacctagtcaccaatgtgaagatattaggaagtggggcctttgggaggtgattagatcatgaagacagagggattcatgctctcatgaaagaggtttcagagagctgcctcaactcttttcaccatggaaagatgcagtaggaagaccccttctacgaaacaagaaatggcccctcatcagacaccaaatctgtcagtgccttgatcttcccagcctccagaactgtggaaaataaatttctgaggtgtataagccacccagtttaaggtattttattatagccacctgagaggattaaaacaggtgctctctgggcaaaggaagtgtcctcatccagatttggagggtcaggagagggtttttggaggaaataatgcctattctgagacttgacagcaaagggtggaaagaagaagagtatttcaaaaagaaggaaaaataattccaaggctatccagtgacagaaagtataggatgctaggggatccttaaaaagttcaatgggctggatgtggtggctaacccctgtaatgccaatactttgggaggccaagatgggaggactgcttgagcccaggagtttgagaccaacctgggaaacatagtgagaacccatctttactaaaaataaaaatattagctgggtgtaatggcatgcacctgtgggctcagctactcaggaggctgaggtgggaggatcacttgagcccaggagtttgaggctgcagtgagctgtgactgtaccactgcacttcagcctgggtgatggagtgagaccacatctcaaaaaagaaaagttcaatgtagctagagtggagagataacacaggtgatatgggtcaaggccagatgacgcagggtctcaaagacactgctaaaagcaatgggtcaccttgagaggacttgacaagaagaaagacttggtgagatttatattctgtgtagtaaagagttaactccttggggttggggagttcaaactctgcatattccaaaggaaggactggcccttggctggctcctggaaagaatatctgtatatctagggctttgggccatgcctggtagcttatgctcacaatgggatctatggtgactgcctgtttgtgttcagctggggccctgggacacacggtatcagtttgatcttggagtgtgctggagacccagcagttaaagtcagtcacatgggtgctccatgtcaatgtaactgagccccaataaaaaccctggacaccaaggctcaggtgagcttctctggttggcggtacactgtacattgtcacacaccattgctgggagaattgagcactgtttgcataactccactgggagtgaacagctggaagctcatgcctgatctcccctggacattgccttgtgcatcttttgctttgcagattttaatctgtattatctgtattcttccactgtaataaaccataactgaatttcacagcttttctgggtcccgtgagcccttttagcaaaccttcaaacctgagagtggtcttggagaaccctgacacatactcttacaaccttgaagctactccaggtcaataagattcttgttctagttgcatctcaagagaaaagcaattccctctctgacgaactttcagatgtcctacctgcttgctggccacaggactttaggggatttggagatggacaaaactggcctctgtctccaagcagctcagagtctagagggcaaggcagaaaggagaccaaagacagcaatcagcacgtggtgtgcttttatggcagagtgcgtgatggagggctagtgggttcatccctaccttaaattctggccaggaatggggacaagtcacagcacccagatcagagattaagttgatgaagcttgggggaatggtgctgtgtatctcaggggagaaggaggtgaagtgaagccaatgctgtgtgggccaggattgaatcccagagagaattttcttttcttttcttttctttttttcttttttgagacaaggtcttgctctgtcactcaaatgggagtgcagtggtgcaatcttggctcactaccacctccacctccccaggctcaagcaatcctcccacctcagcctcccaagtagctgggatacaggcatgcaccaccacgcctggttaatttttgtatttttttttgtagagatgaggttttgccacgttgcccagtctggtctcaaactcttgagctcaagtgatccacctgcctcagcctcccaaagtgttgggattacaggtgtgagtcactgcacctggccaagagttttcttctagaaagtccgcctgaagttgtgcagcatttccagtagccagagctactctgagagataaatgaggctctttgccaatgttggctaaaatctaaaacatcacccaaggcaacctgtatcatactctctgacttctcccctccacagcccccttgccctgccctccagggagtgtcccttgcaaatgtcactgttcttccttccctttcataccaccttcatttaacaatcaaaacagctggccaggcgtggtggcttacgtctgtaatctcagcactttgggaggccgaggctggcagatcgcctgaggtcaggagtttgagaccagcctgaccaacttggagaaaccccatctctactaaaaatacaaaacaaacaaacaaacaaaacaaaacagctaggagtggtggcacgtgcctgtaatcccagctactcaggaggctgaagtaggagaatcacctgaacctgggaggtggaagttatgatgagccaagatcatgccattgcactccagcctgggcaacaagagtgagactccgtcacaaacaaacaaacaaacaaacaacaacagtcaatgcatgccaagaactgtgctggatgttctattacttatttattttattttttaacttaatttgtatttatttttatgttttagaggcagggtcttgatctgtcacccaggctggagtgcagtggcatgatcatagatcactgtagcctcaaactcctaggctcaagtgatcctcctgcctcagcctcctgagtagctaggactagaggtatgcctgcaccatcatgcacactaacttattttattttacttttgcagagatgggggtcttgctatgtttcccaggctggtctctaactcatggcctcaagtgatccctccaccttagcctctcaaagtgctgagatgacaggcataagtcatagttcttggccatctactcttttaaataatccacacaacagacatctatttctttttttgagacagagtctcgtcctgtcacccaggctggagtgcagtggtgcgatcttggctcactgcaacctctgcctcccgggttcaagcaattctcctgcctcagcctcccaagtagctgggattacaggcacgcaccaccacacccagctaattttttctatctttagtatagatggggttttaccatgttggccaggctggtctcgaactcctgacctcatgatccgcccaccttagcctcccaaacagctgggattacaggtgtgagccactgcgcctggcccagacatctatttctaatgcagtaagctgggtaataagactgactctcttgctgaaaacgatgacaaatcctgcataaaatctgaagtccatgttgttgaaacaagaaaggcctgacaattagtagttatcagccccaaataaataagtgaagtcaagaatttcccagaggtaacctgagcatctaccagagcattaaaaccacttttgccccaagggcatctgtctaacccatggaactgctgcttcaagttttatggcctcctagggagcaggggtggggcaaagtccagggtacacacgtgttagaaagtctcaaaggagacacaccactccccaagtaggatggggccccaataggctatcactttcaggtaagaaacctgaagttaatttactcccgtctttccattcccagagatttttgaggaagttactttggcactttgcagaaaaggagaaaaacaaaagtttttgagaaattataaccacaagctggcttttgcagacactggtgacctaaattctcaacacattgttggtctaaaagtctaagatggtcctagactgggagtttcccagacacctggaaaaagtaaatgcaaattgtccatggagggttcgccttcatcgcaggcctcaatgaactcccttcaacagtgtcccatggatgccgggcacggtggctcacacctgtaatcccagcactttggggggccgaggcgggttgatcacttgaggtcaggagttcaaaaccagcctggccaacgtggtgaaaccctgcctctactaaaaatacaaaaaaattagctgggtgtggtggcacacgcctgtaatcccagctactcaggaggctgaggcaggagaatcatttgggcctgggaggctgaggttgtagtgaactgatattgcaccactgcactccagcctgggcaaccaagcgagactctgtctcaaaacaaaacaaaacaaaaaatagtgtcccatggaaaatgagcttcacacaaccaaagataacaagacattcaagaaaacaaggcaccagaatgaggaatcacaggaaacaagagacagcagaaaaaaagccataacaattttagatacttaagttattggacactgattataaaaattcttcgcatattatgggctttttttagatttagccttttcttttgcatattatacttaaagaaatgtaagacatgcttgaaaatacctatagaacaattctcaagtgggggcgtttctaccctccatgggacatttcgtttggcaatgtctgagccatttttggctgccacaactggggaggggctgctactggcatttagtagggtgagaggccagggatgctctaagtatcttagcacagggtggtagctcacggccaagaattacctagcccaaaatgtcaattgtgccaaggttgagaaatcctgctgtaggaaaacaatactgcaaaagatgaagcaggattaaaaaagatcagacagcttgtaggaagaaaacaattctaatacttggaattaaagacatagtgggcgtggttaatagcagattagacatagctaaagaggcaactggtaagctggtgagagacaggtaccattattctcctcatttgacaaataagtaaactgaggcacacagagagccagcatcttggtttgctgggaaataaatcacaaattggcatccacctaactcaagatctgtgctgttatccactctgccattctgtttaaacccaagggaatggtgtcctctctctgcctgagcctctgaatgtcttccccatttgctattttctttggcaaaatattttagggaaaatagaatttgtctaaaaatgcctgacagaagaaaggcacattgtgttgcattagcatgcaggcaacaatgcctagcggggaaaaatggcacagcaatttccgtctctaaaacatttaccttccattaactaattatggcccacagttcatagtcaaggggcttgggggtgtttatctttacacagacacagggaaaatggaagaaatgcaccgataaaagtggtcccccccagggcatgcgtggtggctcaggcctgtattcctagcactttggggggccgagatgggcggatcacctgaggtcaggagttcgagaccagcctgaccaacatggagaaaccccgtctctactaaaaaaaattaaattagccaggcgtggtggcatatgcctgtaatctcagctactcaggaggctgaggcaggagaatcacttgaacccaggaggcggaggttgcagtgagccgagatcatgccattgcattccaggctgggcaagaagagcgaaactccatctcaaaataaataaataaataaataaataaataaataaataaataaagagttccccctatgagctgctagaagctggaatgcagggtccagggccgtcccaaatttgcaaccctagagtcttcagctgcaggatcttgggcaagttacttcctctctctatgctttgatctctctctctccataaaatgtggatcatgaaaaacaacccttttaggattctttccaaagatccaaggagatgtgtgttaagggcatggcacataacaactgctcagtgttactggtgattacttctattgcagaagcaggaaaacacagtggtaaaaacaaacaaacaaacaaacaaacaaacaaacatacacacacactctgggatcacactcctgggtctgaatcccagctctaccactccgtagctgtgtgacctttggacagttacttaacctctctgggcatcggtttcctcataggtaaaatgtggataataacaggttgtttttttttgtgtgtgtgacagagtttcactcttggagtgcagtggagtgatctcgactcactgcaacctccgcctcctgggttcaagcgattctcctacctcagccaagtagctgggattacaggcacctgccaccatgcctggctaatttttgtattattagcagagacagggtttcaccctgttggtcaggctattcttgaactcctgacctcaggtgatccacctgccttggcctcacgacgtgctgggattataggcgtgagccactgcgcagggcaagagctcttatcttataggctctttagaagattaaatgggttaatatttgtaaagggctcatagtaaatgctagttgttattctcatcacaatttacctggattattaggctgatgagtgcaatgcagttgaactgaagttttacaagggcagaaagcaggcctgtcttgttgaccgatgtgtcatcagggcctagcacatagtagaacctcagtgagcaattttggaatgaatgaagtatttcctttttacctgccaatatccccaaatgtaacaaaaaccatgactaccatttgctgagaatctaccctggagcaggccccctagtgggcatattacacggatcatctcctcgcatcctcaaaacaacgctgagacaggtggcatcgttccatttcacagataaggaaaccgcaggtcagagtggccccgcagcctgtgaagggaaaagccagaattttcgccacgtccactgggattcccaaatccaaatgttcagctactttctgccaccagtgtttccttcaacctgcgatccgctctcatggatgtcacagccaatcacgtagaccccgagagccctcatgtttgtatttctttgcttctaccatatgttccccctgcttcttactgaagaatagaagcagttcaatgcctcagtttccctactcataaaaggaggaaaacaacagtggtgttctcagaatggccttgaggacggcacaggtgaatcacgcctcaaacagagagagcctctgcaaatggaatagcctctctaccacttgcctatgaatccccccaccaccttgaccctcgggcacacatctttagatttgctgaccaccttctgagctgggtctcgctcctctgcccattagctttctttgcccaagctgatttatctgtcatttctccccctccagcctctatcactgtgcgtacacacacacacacacacacacacacacacacacacacacccctctttctctctcttcttgcagcctcttcagccactaaaattagctccatctctagtccacatccccagcacgcctgtcctggtttctctgggctcccagccacttgcgatattgtgtctcagatgccacacgctgcctgcctgatgtcacagccgcttcctaaaacaagaggtattttgagatcttggagggggtgggagcggggggaagggagggatttcacacatcttcctcccggggtgtttttaaaaaacgctgacacgagagatgtgtgcccccctcactgtgcccctcactcctatttttagtttcaaagcgtccaaaaaaaaaaaaaaaaaaaagcttcagagccaatgagacctctaagggccccagtgggtcaaatcttgatttaaaaaaaattccacttctgggtctatatccaaaagaattgaaagcagggactcagctatttgtacacacaggtttacagcagcattatttacaatagccaaaaggtggaagccaagtgcccatctggatgaacagataagcaaagtgtggtccatccacacaatggaatacgattcggcctggaaaagaaggaaattctgactcatgctacaatatggatgagactggaggacattatgctccacgaaacaaaccagtcacaaaaagacaaatactgtatgattctactcacaggggggacccaaagtagccaaattcacagagatagaaactagaacggcgggtgccaggggctgggggagtggggagtgtggagtagggtggggggagtggggaggggggaagggggagtcggggagaggggaagggggagcggggagtgagagtttcctgggggcagagcttcagttttgcaagatgcaaaagttctggagatggatggcggtcctggttgcacaacaatatgaatgtacttaacgccgctcaactaaacacttaaaaaatggtacattttatgttatgcatatgttaccacaatgaaatatatatatatattttttgagacagagtttcgctcttgtggcccaggctggattgcaatggcatgatctcagctcactgcaacctccacctcccgggttcaagcgattctcctgcctcagcctctcgagtagctaggactacaggcgtgcaatgccacgcccagctaatttttgtatttttagtagagacagggtttcatcatgttggccaggctggtctcaaactcctgaactcaggtatctgcccgcctcggcctccccaagtgctgggattacaggcgtgagccaccattagaacaatgagacaagcaggtcaggaggagatagcacatggacagggggtgaggatgttaccacctagtcatggcaggggcttgatgcccctggaagattttactggcacaattcatattacaaattatttagtgaatacttactatgtgccaggctgtgttctaggctctgggggaatagcagtgaacaaaacagacagaagtccctgccctcatggagctggcattctagtgggggcaggggattggcaataaccaataaacaagtaaatatagcttggcagatgctcttcaggggtgtagagggaaattaagcctagaggcggggagtggggtggcacagtgcaggtgaggcagttacatgttagaaggacacttgagcaaagacccaaaggaagtgaggggggagccaagcagatatctgggggaagagtgttccaggcagagggaacagcctgtgcaaaggccctgaggctggggagtgcttggtgtgtaagggacagcagggaacttgtgtagctgaagccgagtgagtggagaggagagtgggaatagagggggatgggggatcacaggggcagagtttgtgggtccctgtgaggagaatttgggctttttctccaagtgaggttgtgagcaaagaggagccaggtcctgactcagtggctcacaggtgccctctggctgctgtgtggggaacagtcctgggggtggggcaaggactgaagttaagagaccagattggggtggaggggcaactggtttagtccaggccagcaaagatgggggctggaccggggtggggctgtgaaggtggtgagaggtgggtggtggattctgggtagattctgaaggtagagccaataagatgtgctaacagattggatgcagggggtggagaaaaagaggcatagaggcatagaggaagatctggaggtctgaggccagagcactgcagggggttaaagccgcctttacctaaacagaaaatagggcaggaggagcaggtttgggtgacggtggtcttttggaggagctgtaatccctctaacacctcagagtcagctgcacacccatgttcatgacagcactcttcacaatagccaagatgcaggtacaacccaaatgtccatcagtaaaggaatggatgaagaaaatatggcgtgtatatgtacacaatgaagtactattcagtctttaaaaaggagcaaattccatcttttgcgacaacgtgcatgaacctggaggacattatactaagatgaaacaagccagacacagaaacgcaaatagtacacaatctcgcttatatgtgagctctaaaaaatttgaggccgggcgtggtggcccataatcccatcactttggaagcccgaggcaggcagatcacgagatcaagagattgacaccatcctggccaacatggtgaaaccctgtccctactaaaaatacaaaaattagctgggcgtggtggtgcacacctctagtcccagctactcaggaggctgaggcaggagaatcgcttgaacccgggaggctgaggttgcagtgggctgagatcatgccactgcactccagcctagcaagagagtgagactccgtctcaaaaaaaaaaaaaaaaaaaaaaattttaggccaggtgcagtggctcaacgcttgtaatctcagcactttgggaggccgaggtgggtggatcactggaggtcaggagttccagaccagcctagccaacatggtgaaaccccgtctctactaaaaatacaaaaattagccgggcctggtggcaagcacctgtaaccccagctactcgggaggctgaggctggagaatcgcttgaacccaggaggcggaggttgcagtgagccaagatggcaccattgcactccagactgggtgacagagcgagactccatctcaaaaataaataaataaataaataaataaataaataaaaattaaaaatttcaaaaaataaaaaatttgaacccatggaagcagagagaatggtggttaccaggggctggtggtggagggattggggagatattaggcaaaggatacaaagtttcagtcagacaggaggaatacgttttagagatcttttgcacagcatggtgaccacaattaatgataacgtattgtagtgtatgtttcaacgtactatacaacataatgtaatatacaacataaggtattgtatatttcaaaattgctaaaagagtagattttaagcgttctcaccacaaaaaataagtatgcgatgtagtggatatgttaattggcttgatttaatcattcaaaaatgtaaacatatatcagaacatcccattgtactccatgaatatatataattaatttttcagttagaaaaaaagtcaggctgggtgcagtggctcatgtctgtaatcctagcactttgggaggctgaggcaggaagactttttgaggccaggagtttgagaccagcttgggcaacatagcaagaccccgcctttataaaaaaacttaaaaattagccaggcatctggctcatgcctgtaatcccagcgctttgggaggctgaggtgggcggatcacgaagtcaggagatggagaccatcctggctaacacggtgaaaccccgtctctactaaaaatacaaaaaattagccaggcgaggtagcaggcacctgtaatcccagctactcgagaggctgaggcaggagaatggcatgaacctgggagatggggcttgcagtgagccgagattgcgccactgcactccagcctgggctacagtgcgagactctgtctcaaaaaaaaaaaaaaaaaaattacccaggcatcatggcgtgtgcccatagtcctagctactcaggaggctgacgtgggaggattgcttgagcctgggaggtcaaggctgcaataagccatgatcacaccactgcactccagcctcggcaacaaagcaagacgctgtctcaaaaaaaaaaaaaaaaaaaaaaagtcagctgaagaagatggacccccagggacatggaaactggtttgcacccagagccttggatcagggcctgcattgtggggaagtgaccttggtctggctggtaggcgggggatgcaggtcagattattgacctgggctttggtgtctcatctgctaataagggatgcaaaaagccccaacctcagaatctctgggaggcaccaatgggagaattcttgcaaagggctcagacagcccttccctgcatagcacccagcagaacaagagcaagtataagtattagcaatggaatggttgcagtgtgtctagctaacctctcctgggcaacactgcatcatccagtggccatcccctgggaactaagtcaagcagcaaacgtctggaaacagggtctttactttccagaatcagataatcacagaatcagcaacctctactccatgtattgagtgtggcagttaagagcttcgacactgaagtcaagcttcctcatttaaaccccaattccaccacttcctagccgtgtggcttggggcaagtcctctagcttttctgaacgtcagttttctcatctgtaaaatggggagattgagagtgaatgaaataatccctgcaaagccctaagggcacagcctggccacacacatgttatatctgtgttcactattgttgttgttattattatttttagagataagttttcgccctgtcacccagggtgcagtgcagtggcgtgatcatagctcactgcagcctcgacctcctgggttcaagtgatcctcctgtctcggcctcctgaatagctgggactacaggctactgttattactgataccttcatttgtcctgtgaaataggtacaatgagcccctgagatattaggttggtgcaaaagtaattgtggtttttgccattacttttaatgtactttggatctgtgtctgtccgcaaccaaatcttatggcgaattgtaatccccaatgttggaggtggggcctggtggaaggtaattggatcatgggggcagatttccgccttggtgctattctcgagatcgtgagtgagttcttgtgagattggacatttaaaggtgtgtagcatctccccactctctctcttcctcctgttctggccatgtgaggacacctgctccagctttaccttctgccatgattgtaagtttcctgaggccttcccagaagctgagcagatgctgccatgctttctgtagagcctgcagaatcgtgagtcaattaaacctcttttctttataaattaccccagtctcagggtttttatttatttattattattattattatttttacaaggtctcactctgtcgcccaggctggagtgcagtggcataatcattgctcactgcagccttgacctcccaggcttaagcaatcctcccacctcaccctcctgagtagctgggaccacaggcgcgtgccaccacacctggctaatttttgtacttttagtagagacaggatttcactgtgttgcccaggctggtctggaactcctgggctcaagcaatcttcccaccttggcctcccaaagtactgggattatgggtgtgagccactgtgcccagccaggcatttttttttttaattttttaaaaataatttgttttttgagatggagtctcactctgtctcccaggctggagtgcagtggcgcaatcttggctcactgcaacctctgcctcctgggttcaagcaattctcctgcctcagcctcctgggtagctggaattacaggtgcatatcaccatgcctggctaatttttttttttttttagaagagatggggtcttgctatattgcccaagctggtctcacactcccaatctgcccaactcagcctcccaaagtgctgggattacaagcataagccatcacgcccagccccagccaagcatctcgttatagcaatgtgagaacgggctaatacaggccccaattttcagatggggaaactgaggctcagagagacaacagtcttgccagaggtcagcagagcagcagaggtgagcaggaagggtgctctgccagcctgtcctcattttcccagatgtacactggggacaatgacggcacctaccaagaaagatgtgcctggaggattaaatgagataatttactcaagatattgagaatagcactaggtacaaattgtggatgaatgttggtgtttatcataactccctcgggtcactcggctgggcactggagaagcccatgactgtctgactgcagggtccagctccttattacagagctttgctgctgaacctacaatttaaaaacacacaaggctttacttgtttttgttttgttttgttttaagatggagtctcactctgtcatccaggctggagtgcagtggcgcagactcagctcactgcaacctccacctccccagttcaggtgattctcatgcctcagcctcccgagtagctgagattacagggatgcaccaccaaacccagctaatttttgtatttttagtagagatgggatttcatgatgttggctacgctggtcttgaactcctgacctcaagtgattcaccagcctcggcctcctaaagtgttgggattacaggtgtgagccaccgtgcctggcctgcctttgcctgtttcttcagaaaggacaagggaatgaaaaatcagggattgttccctgagccttcgctttttcgaagcactcagcattcctggtgcccaaggcttcccacattgtccccttggctggtacagctgctgaggcgagtgtgattctgaggttggggctttttgaattccctgtttgcaaataagagaggaacctcagctgctcctgaatccacccagagcaggctgggcagtccctgtttttctcctcctgctacagaacaacaggactggaattaagtatagctcttcttccttctgtccatcccctagcaatgtctgggcaagcctaacaaaagccatgaagcctgtattatcagctatgaattcattcattaattcactcattcattcattcactcactcattcattcactcattcattcatccactcactcattcattcactcattcattcattcactcaatcacccatttatgcattcaacagatttttactgaaccccattctcaagttctacacgaggctctgtggttctgtctttaccccccagaggaaggagacagatgattaaccaaatagacaacattaagaggattcacactgatgccacagatggccataaagaggggacctaaactggtatcatagtgggcatgcagtggggagatcagggaaggcttccttcctggaggaagagacagtatcatatcagtaaacatgtacttccttgaggcctgagagtgcccctttggcaccttggcccctcttcaaggcccctggactgcccccacaatgcagcaaacaatgagtacacatgtggcacaacaggggaacctcttttcaggttagctggtgtccctgccacctggatgttaaatactttatgtatcatgtctgggtaagaattaagcagatacagaggagggagcatatctcagacacaggcacacagcatgtgcaaagtccctggggtgagtgggcagaagctgctcgtggagaaggctggtgtccctttccctattttctccctctaaaatttgacagtggacagaaggaagcctggttctacagtggggcagagctgtgtccaaatcctggctctagccacacagaactgtgagaaggtttgaagatgataagctatgtaaaggatctaagacccagcagatgctcagttcatgctctctgaagttgatctctacgccggcctcggtttccataaacctaacactgcagaagggaagagaggtggaggcagctaagaaaagaaaagggccaggtgtggtggctcacgcctctaatcccagcattttgggaggctgaggagggtggatcacctgaggtcaggagttcaagaccagcctggccaacatggcgaaaccctgtctctactaaaaatacaaaaattagccaggtatggtggcgtgctcctgtaatcccagctactcaggaggctgaggtgggagaattgcttgaacccaggaggcagaagttgcagtgagccaagatcacgccactgcactccagcctgggcaacaagagtgaaaccccatctcaaaaaaaaaaaaaaaaaaaaaaagaaacaaaaagagttggggcgggagggagaagagttaaggtctccacatagacacccaaccagcctggcctctgcccccacctgagcccctgagccaatggaatcagagccaggtttccatccagctctgatcaggagtgggtaacatttcaacaaacaaaatccaaagccccagtggacagagggagccaggttgcgtgtctgtgcatgtcagcatggcagacaagaaatctcttcccttgcacgccaaccacctgtgagggttcagaactcagatatcacagtgagatttgataaaagctggaagcatctgaggaggctgtgtaatcattcccacttttctttccagcttgctgtatgatgggccctctgctctcagcagagtttttgctgacattttttcctccttttctctgtgcaagtgacacagtaatgacacgtcatctacattgattgctgagggtcagggatggaaaggaatctgaaaatatgctctgagggcccacagaagtcagggcaaaaggccccagggaacaggaatggggccccagtggccccaggtaaataccagatgggctctgttgccccattccttgaatctggaccagcttcattgcttgctttggacaacagtggccaacacgatgttgtgccattcctgggactagcccttaagaaggctgaacacttcctctttctcttagaatcccattgctgccacgtgaactagctcaggctagcctgctggaggatgaaaagctgccatgtgaactagctcaggctagcctgctggagggtgaaagaccatagggagtggagcacagtcattccagccgaggtcatcctggaccagtctgcagccagctaacagccaaacagaagagccacccagctgacccgcagctgaccaaagatgcatgaatgagctcaactgagaccagataaagcacccaactgggcccagcctaaactgccacccttcagaatcatgagctaaataaatgcttgtcattataagccactgggtcttggggattgtttgttacacagccgtattatggcaatatataactgatgcaaaggagcatacagaagaggtaaatatgagttacactaagacagagttttaaaataaaatatcctgattttattttattttgattataggtgcacgccaccacacccgactaatttttatatttttagcagagacgggatttcaccatgttggccaggctggtctcaaactcctgacctcaggtgatccacctgccttggcctcccaaagtgctgagattacaggagtgagccaccatgcccagctttctctttcttttctgactatcctgttcccctgtttcctggtattgccaaacaaaccacttgtcctcaaattttttttttttttttttgagatggagtcttgctctgtcacccaggctggagtgcagtggtgcgatcttggcttattgcaagctccgcctcccaggttcacgccattctccttcctcagcctcccgagtagctgggactacaggcgcccaccaccacgctcagctaatttgttgtatttttaataaagacggggtttcaccatgttagccaggatggtctcgatttcctgacctcgtgattcgttgccctcaaatctttgtctcaggatcagtctgggttctgggttcttcttttttctttttttttttttgacggagtctcgttctgtcgcccaggctggagtgcagtggtgccatctcagctcactgcaagctccgcctcccgggttcacgccattctcctgcctcagcctccccagtagctgggactacaggtgaccgccatcatgcctggctaatttttttttttttgttttgtatttttagtagagacggggtttcaccacgttagccaggatggtctcgatctcctgatctcatgatctgcccgcctcggcctcccaaagtgctgggattacaggcgtgggccaccgtgcctggcccagtctgggttcttgattgcaaaaccaaacactgaccggctatcttaggcataaaagggatttttaggaaactcagataatcaacagggggccagaagaggggatttgggaaatcagcaggaacaatgtagccagcctgaccttctcctgtagcaggaggccatgaaagagtccaaaccatcatgtttggatcacttggtccattttcaaattcctgggtaggaaaacgtgactggttgagttttttattagtttgttttttgagacaggatcttgccctgttgcccaggctgggctggagtgtagtggcactatcacggctcactgcagccttgacctcctgggctcaagcaatcctcctgcctcagcctcctgagtagcggggactacaagcctgtgctaccacccccagctaattaaaaaatttttaagagataggggtctcactatgttgcccagtctggtctcaaactcctgggcttggctcaagctatcctcctgccttggcgtcccaaagtgctgggattacaggcgtgagccactgcgcctggccctggttgtttaaatcacatgccctgactaccaggtgatggggtgacaatgaatccctttcaccttcaacttattagtgagggtgggatcccatagaccagcagtactttatagaaaggggaggattctccctaaattggaaagggaggtcagatattgggaacccaactaataatagcaaacgttccctacagttaactaactggtctatggaactgggcctggggaagtagtaataattattatcatcattataatgatagttattagtcttacaatagctaatataattgagcacttattctgtgccagtttttgttctgaatgccttatatgtatctcactgacttttaccttttgaggtaggtgcaattattattcccattccacagatgaggaagctgaggcccaatggactatatcactttctctttcttcagactgtccctgggcaagtaacatccataaacccagcccagcatgggtcagacattaactcattgaaccttgaaaacaactccataaggtggtagtattttgttgttgttttgtgttttgttttgtttgtttgagacaaggtctcgctctgttggactgcagtggtgcaagcacggctcactgcagacttgacctcctgggctcaagtgattctcccacctcagcctcctgagtagctggaattacaggcacacactatcacacccagataatttttgctttgttttgtttttgtagagatggagtttcaccatgttgcccagaatggccttgaactcccaagtttaagcgattcacccaccttggcttcccaaagtgtttggattacaagcatcagccaccatgccccaccaagtcaggggatgctactactctcattttccagatgaagaaatggaagattcagggaggtacagtaacttgcccaaggtcacacagcttggaaacagtggagtcaggttgggaatccactctaaccccaaagaccaggtcttaaccactatgcttccttacgtgtctatgtagactggctgtcctcatttagagatgcctgcacaagaagcagctgggttgcaaagcaatgtttaaaaaaaattattttttgagacagagtcctattctgttggccaggcatggtggctcacagctgcaatcccagcactttgagaggccaaggcgagtggatcacctgaggggagaagttcgagatcagcctggccaacatggtgaaaccccctctctactaaaaatgcaaaaattagccaggcatggtggtgtgcgcctgtaatcccagctacttgggaggctgaggtgggagtgcttgaacctgggaggcggaggctgcagtgagccaagatcgcgccactgcactccagcctgggcaacagagcaagaccctgtctcgaggaaaaaaaaaaaaaaaaaagagtctcggtttgttgcgagtccagtggcatgatcttggtctcccggcttcaagcggcccaccaggcagccacctccctgccctggtgagaggagaggagtcattaggcatgcaaactgtagaggcagtgggacagatgccccttggaggcaggctggcatttgtcatagcaattcgagaaaacaagacctcagtcggcccccaaacctgcggagagatggatggcaaggtcttctccagccccacagggaaaatggccaagaagctcagtatggaacaaggtcacctggccatctggcctttactcagtccctctccaccccagctggaggcagagggagggaagagaacattttagcacaatacggtgtgctgggagctgtccagggtgctgaaacctgtaacccgctaagcttccaacttccgctccttgagttagcgccgagtagaccccaaggcaaaaactagggtccaatggttaatttgggaggtaatgcaaggaattacaagtgaggaatgaggaagagagagattggtaaagggtacactagtgaatgggttttatgtgaacaactaggattcaattttactgaggcacctctatgatgctgtataacatatttcagtgttttcccactgagcaatggggaagccagggtatttatacactgactccctagctcactggttgagggatgctaccgaggttgttaagcatctggctcagcaaactctgtgatgccagagactgccctccaacagagatgtagagagatgggagtgtaccaagaggaagctgcaggtgaacttagacgtaagctaggtaaataaggcatggagaatttgtagcatctatcacatgctcccccacaagaatttaagtttttttccttcagttcaccaactttcgtgtgtgatgcaaaccctaggagctaggcactagttttactccctttttccaggtgagaaaactgaggttcagtgagttcaacccacattctcactgtcatagagggaggagcttcctctgactctgaagtccaggtcttaaccatggcgctaggccaatctctcatttcttgaaatctcttctgctcctgttttcccccagccatagtggaacccaagatcagggaggggaaggaaggatcaccctgacttcccatgtcagagagctctattcaaattctcaagtttattttccttggcaaacttgaccttagagaaatagcgtaggattcaagaaaatgggttctagatccagatctgccttagttcaaatcctgggtccaccacttatgagacagatgctctggcttgaatatttcaaaccttccaaaactcatgttgaaatttgttttatttattttatattattatttattgacacggggtctcaccctgtcacccagcctggagtgcaatagtgtgtgtgcattatagctcatgcagccttgatcttaaactttccagtctccataactgtaagaaataaattgctttttctttataaattactcagtttcaggtgttctgctataagcaacagaaaacagactaagacagtaagcatttaatgtctttgagcctcagttgctccatctgtaaatgggaataataatagtatttatttaaccttgagagttgaaataattttatttttatttttatttttagagacagtcttgctctgtcacccaggctggagtgcagtggtgtgatcatagttcactgcagcctcaaattcctgggctcaagcaatcctcctgcctcagcctcctcattagctgggactataggcatgtaccaacatacctggccaactgaaaaaataaactttttacagagacaggatcttgctatgctgctcaggctggtctcgaactcctgggctcaagtgatcctcctgacttggcctcctaaagtgctgagattataggtgggtgcctatgtatgtatataatatatagtatatcatattgtaagcacctcataagtttcagcttatcaatgttgccactgttgttaataacaggcattacattcctaaggacactgggttgaatacagctctttgctgaacttaacacaggcccagtattattctaggtttagagaagtgtcctagcagagaggctgagatcctgatccaccccttaccagctgtgtgactcccttgtgagcagcttaacctctctgagcctcagattcatctgtacaaaggctagcgaggctcaatgtgataatacacataaaactcttaatgtagtccctggcacatagtaagtactcaataaatgataagaataacgaccatggcagctaacatcattattatcactgtcactgctggtgttgttagaagatggaagaaaatagctcctgctgctaggaagtgatgtggttcctggtgaaacatggtccagcaaatatcatgacaaccaaaagctttgaacaataaaaagatcgatgctctctcaatggtataactcactgagaatgacaaaaagcatttgtgtcacagtggggaatccttttggtaccaaggatgactgatccatggaggggagaaactactgcagagagacattaaaataaaatgctgctggtatttataggaactgttgctggtctcatgagttagaatgctggttgtgttttgttgttgttgttggaatgctgtttacatgtgaaggcaactaagagcaggtgcatggggcaggggtgaagaaagaaaggaggtaagaagcaactacatgtatttattcaattaatcaaaaaggagagaggacatgagaggtgtatggtcaagacactgacccctctgagacttggtttcctcaactatataataaaaagcgaggaactgggattattctctgaggatccctttcttattctctggaaagaggccataggctagtcagggggcaagaggaaggaagagagagctgggctctagtggcagaacctgaggggtgatattaaacatttataccacttccattgcccaaaaagccagggttcctggctccatgacttgaagacaccttcttattctagatctcttgccaccatctctgtgtgactttggacaaaccacttgtttgtgagtaaaacagaagggctggacctgccagaatccatggagccttaaaatccaatgatgcggcccggtgcggtggctcacgcttgtaatctcagcactttgggagacagaggtgggcggaccacctgagggcaggacttggagactagcctgaccaacatggagaaacctcgtctctactaaacatacaaaaaaattacccgggcttggtggtacatgcctgtaatcccagctactcagaaggctgaggcaggagaatcacttgaacctgggaggcggaggttgcagtgagccgagatcatgccattgcactctagcctgggcaacaagagaaaaactccgtctcaaaaaaaaaaaaaaaaattcaatgatgcttcaagaccaaaaaacaacatctttccctgatggttcctgtgtagttgtgtcttttccttgcctctgatcttcaacaaaatggcccaaagcctgagacagtttatagacccttctaaaaaggaaccttccgtttcatagagtcataaaatgtcagagctggcaaagacccagagcttctctgtcttatatctcatctgatgttcagggcatctgccatagacttctggactatctgactatttctatcagtgtgttggtcccatcttctaaacagcttagtaaatttcccaggacactcattatcagaagtgttacccttttccggcttaacaaccatttattttactgagcatttattatgtgaaagggacagtgctaaccctgtgaataaaaaagaaaaaaaattgtgctcacccctctctggtgaggttcacagtctcttttcttaacatgcacgatttgtgttatttgatctcttcaatatttatatatatttgagaatgacagtaaaagaactgtcatctcagacatacagccaagcttctgaaatcttcctcttacacattttcagtttcatgatcagaacacaaatacaataaaaacatgccttacaagggtttgacaacattataaagttaggatttctctgaggctctgagttacaaagaacaaacagatgtccggggtaagatcttttccaccaaacttcacccaagaagaaggtaaacaccgtggtggtccacacaaaatgaatcacgttttaacgctgtggtttgcttcaggaatctgagagggcaacaggttaatcagaaagtactcattaggccgggcacggtggctcatgcctgtaatcccagcactttgggaggccgaggtgggcagatcacctgaggtccggagttcgagaccagtctggctgatagtgtgaaaccccgtctctactaaaaatacaaaaattagccaggcacagcagtgcatgcctgtagtcccagctactcaggaggctgaggcaggagaactgctggaacccaggaggtggaggctacagtgagccaaaatcccaccactgcactctgtcccgaaaaaaaaaaaaaaaaaaaggaaagaaagtactcattaaagtcatcactgtctcaatgtcaaattaatatatttgagtcccctcctctctgaaacatagaattaagtgtctactgtgtttctctaccattgacattggcagaaggctaggtctgcatgatgtgtgtgtgtgtgcgcgcgtgttttttctttctttttttttttttttttgagacagagtctcactctgtcatccaggatggagtgcagtggcacaatctcagctcactgcaacctctgcctcctggattcaagtgattctgctgcctcagcctcccaaataactgggattaccagtgcacaccacaccaccatgccaggcttttttttttttttttttgtatttttagtacagatggggtttcaccacgttggccaggctggtctggaactcctgacttcaagcgatctgcccgcctctgcctcccaaagtgctgggattacaggtatgagccacagagcccagctgggattttttttttttttaagacaaaatctcactttgttgcccaggctggccttaaacccttgggctcagggaatcctcccacctcagcttccagtagctggaattccaggtgcttgcccgctgcacccagctcatgcagaatgttttactttcccctccctgttcctagcttacaacccaacaggacactaaacagcaccttggaatttggagtaataaaatttgagcaatgtgcctcatttgaaggagatagaaccaccagacaaaaaggataactgactaccagagaaataagagcaagaaaagcaagtgaaagaaatgcatggagaattcaacaagaaaggagaaggggatgtgaaaggaacccaatctagaatagaaggtcttcatgataggatcaggattccctgagaatctaataaaaactacagaccagaaaaaaaaatatacatatacacaattttcttcttgcataaaatttcagtgggttcattcatcccaacgatgagctctcacccttaggacctatctgttctagatgaagtatttctcctctagaggaatgagtctagaatctcttccatcagatgacaggaaactagaagaaaggccaccttgttgtaagcagggagatacaaacacaagtgacaaactgacctactgaatgactgccttcagtttaatgatcacttattgggacccactaggtgtctgtattagtcaaggttcttcagagggacaaaactaacaggatagatgtatatatgaaagggagtttataaggagaattgactcacacaatcacaaggtaaagtcccacgatagcccatctgaaggatgaagagcaaggaagccagtggtggatccgtcagagtcctcaaacctcaaaagtagggaagctgacagtgcagccttcagtctgtggccaaaggcctgagagctcctggctaaccattggtgtaagtccatgagtccaaaagctgaagaacttggaatctgattttagagggcaggaagcattcagcacaggacaaagatgaaggccagaagactcagcaagtctactctttccaacttcttctgcctgcttttattctggccacactggcagctgattagatggtgcccacacagattgggggtgagtctgcctctcctagttcaccggctcaaatgttaatctcctttggcaacaccctcacagacacacccaggaacaagactttgcatccttcaagctgatcaagttgatgctcaatattaaccatcacactgctcaataatatatgagcttccctaagtgttcccataaccgtgttattatgaaaaaaaaaaaaaaacagggctgcaaaagcccatcaatgatagactggataaagaaaatgtggtacatatacaccatggaatactatgcagccaagaaaaagaacaagatcatgtcctttgcaggaacacggacggagctggaggccattatccttagcaaactaatgcagaaacagaaaaccaaatactgcgtgttctaagtgggggctaaatgatgataacacatggacatacagaggtgaacaacacgcactggggccttttggagggtggagggcgggaggaggaagatgatcaagaaaaataactaatgggtactaggcttaatacgtgggtgatgaaataacctgtacaacaaacccccaagacacaagtttacccatgtaatagatctgcacttgtacccctaaacttaaaataaaagtaaaacaaaaaaaaccacacagggatttttaaggctccttcctgccagcaaggtcaagccagcctcagccagcagaagccagcccccagggagcatgaattggcacaaccactttgcagagcaatttggcaatacctagtggggctgaggatgcacacagtatacaactcagcagttccactcctgggtacgtgccctagagaaactcacttgggagaaagcagggacactttgggtcaaaatagcccaaagctggaaacaatccaaatagataaatacacggcagcatactcctaccacagaatactatgcagtcatgaaaatggatgcatggaaactatttttattaatcagatttatctcatgttgaacacaaaagtcaggttagagaaatgtgaagtttgaaaaacagtaccacatatctctttttttctttctcttttcttttttttattttttattttattttatttttttgagacaaggtcttactttgttgcccagcctggagtgcagtggtgcaatcacggatcactgcagcctcgacctcctgggctcacgtgatcctcccacctcagcctcctgagtagctgggactacaggcgtgcgtcatcatgcctggctaattttttgcattttttttatagatggggtttcaccatgttgcccaggctggtcttaaactcctggactcaagcagtcttcctgccctggcctctcaaagtgctaggcttacaagtgtgagccatcacacctggcctttattaaaaaaacaaaaaaacaaaaaacaacaacaacaacaaaaaacattttttagggacagggtcttgctctgttgcccaagctggagtgcagtcatagctcactacagcgtcgaccttatgggcttaagtgatcctcccgccttggcctcctgagtagctgggaccacaggagcacaccaccatgcccagctgaatattttattacattttatttcattttgtagagacagggtttcactacattggccaggctggtctcaaacttctggcctaaagtaatccttccatctttgcctccaaaattgctaggattacaggtgtgagccaccattcccagcccacatatttcttatctatgcatgtagtcaaagtgtaaactattctcactctgatgctatttaaaaaatattttgaagtgtaaaaataggtagcatatatttcttatatacttaggcagccaaagtgtgaatacataaatgcaaataataaacataaaattcaggaaagtgcccctggatgggggagagaaaggaatgggtctagggagggagaaaacagggattagaaaggttagaaaggttttgttttgctgggcacagtggcttacgcctgtaatcccagcactttgggaggccatgccaggtggatcacttgaggtcaggagttcaagaccagcctggccaacatggcgtaaacccgtctctactaaaaatacaaaaattagctagatgttgtggtacacgcctgtaatccaagctacttgggaggctgaggcaggagaatcacttgaaactgggaggcagaggctgcagtgagctgagattgtaccactgcactccagcctgggtgacagagggagactcttgtcaaaaaaaaaaaaaaaaaaaaaaagagaaaggttgtgttttgatagcaggttactccattacttctctatccccaattctccccattcttctggtcaccttctctagccatgtgggtcttcttactgttgatcaaacatgtcagatacagtccagcctcagagcctttgcactggctgttccctttgcctgacactctgttccagctctcctcatggctcactcactcacctcccttaggttttcattcagatgtcacatgcccagtgaagtcttccctggcttccagcacccctcacccctgcctgccacacatcccatccctcccctgctttatttttcctctgtacccctcaccgccatctgacacactagattcattcatcaattgtgtccatctccatcagtagactctcagctccatgaggacaggggatttttctattttgtttactgctgtgtcccagagcctagaacaggacctggcacacagaagtgttcaataaatagtcattgaataaatgaatgtatacacaggtgtttgctctattattctctacttagttttgcatgggatcttgctaggttacccaagctggtctcaaactagttaggctcaagcaatcctctctctccagcctcctgagtaattggggttacaggcatgtgccactgtacccagctttatacacttttaatttttattttgtggagatgtggtcttgctatgttgctcaggctcgtctcaaactcctgggcccaagcaatcctcccaccttggcctcccaatgtgctgggatacaggcatgagccaccctgcccagctttacattttttaaacaataaaaaagttagccactaggctgtttctagatgagtttcctagtagactaagagaaaagtgcccagtaccataatatgcccttggaacccaccaaggtcccaagccaccgaactgtgagcacagccaacaaagatccctctgtgaacacccaagcccatgagagctagcccagagtccttacaacagactgctgacatctgaaggcctctacagaaacagcccaataggccacagctccttctgtgagaggcaacattgctctgaaacaaatctgcattgtgagagcccggccagcacagtgtgggtgctgcaacccatcacatccgccaagagagacagaacctggagcagcaacaaaacatggaaagctatgatcctgtaaatgattactatgaaaaaggtgtccagtgaagaagggtcttagaatagaagagcccagacttagctgagaggagagtagagagtgggaagaggaggaaccagccattggtaccagatactaatgtccctactggaatctaataaaagtttttaaggtccctgacagactagtaggtcattctccaaatccatttcccttttcttctaagcacaatctgatacttcccagcttcccttgcagtgatgtgtggtcatgtgaccgagttctagccaataggatatgaatggaacaggtatgggtcacaccccttccaaactcataaacctttccaagtatcaccttctatgctcacttctccttcctggtttgatacagacaagcatggagttattggatgatgtgggctgacaatgaagagccacaatatggcaagggtcagggtccgtcagtcattggaggagatgagcctgtcaactaggaacaattattttggacttttttttttcgagatggggtcttgctctgttgcccaggctggagcacggttggatgatcatagctcactgtgccctccaactcctgagctcaagcaattctcccaggcatgtaccaccatgcctggttaatttttattttattttatgttttacagatgggggggtggtctcactgtgttgcccaagctggtcttgaactcctgagctcaagtgatcctcccacctcagcctcccaaagtgctgagattacaggcatgcaccaccacacccagctcaattttgaattttctatgagtgacaaataaacttctgccgtgtttaagtcatttcctagctttggatcttttgttataccagcaagtgctacctcatacagggtgcttagaggaaagcatatacacatttcaaccacagttcatcatatatggatctgaaaactccttgaagacagtaactgtaccttatttagcttgcttttctcctttgtcataatcacaatcccttgcacccagacattctcaaaaaacattcaccaagttgaaataaaagcaagatatcctcaagcaaatcaagagacccatgcacgtacaacacttaaaaccttgagttctggaatgcataatcttctgttcatctcccagttccatcacttacttgctgggtggccttaagcaagttacactctgagtttctgattcctcagtggtcagatgggaatattaatatttcctaattcagtgggttgttgcaaggattaaattagagaatgggcataaagcactctggaagcagccaacaataatgagctattattttaattgtaacagaaagcatctgctgtaatatacagctgagacatggaggtggggtgttggcagaaaggaggcaggcgcataacaaggggagggagaacacaagggctcagccttcctgagcctggcccggaccacaccaaccaaaagcctcgtaatccttcagctagttaaatccaaagcgtatagcacgcgccacttaccccgttagcaccaccacaaagtccatgacattccagccattcctcaagtaggagcctttgtggaaggcaaacccaagggcaatgattttaattccagcctcgaaacaaaaaattccaatgaagtatggttctgtgtcatcctggaagggagagaaggcaaggtcagcgtcttgggctgggcagatgttgacaagatcagggaaccagcccacctagaaatcagtacctatcaccctctcacttcccctgaccctcctgcactcaccacccctcactgcctcttgcagagttctcttgtccaaagccttttgcgagcaaagccaatgcctagagaaggcaccttcctccttcattccttttgggccaacctcacatatcactcagctaaacagaattatttgtttgcacctgtcttattcaatacgacagtcacaggccacatgtggctatttcaattaaaattaatttaaatgcaataaaataaaaaacacagttctgcagtcacactggctacatttcaagtgacaatcctattggacagggcagatggagatcatttctgtgactgcagaaagttctaatggaaagcattggtttagagaatttacttgtcacatgcagcgttcaaggtatttgaggctagagcttgtgcattgacctcactcctaaatctgaccccttaggatggttctcagctggcatgtagattgttaaaggtttggaataggacttctgtactggctgataagtggccagtatcctcacctccagttcctctgcagaacctccggctggttctggcttccagctgctaatctatcatatttgaaattaagctacaagctcttctccatcagagccccaatgtgaatgttttcccatctgttacagcaacgtttctcgagctacaatcattttcactctgcctgaatgattttttttttccacattagcttgccactggtacttctacttgcttaccagtctttcaatggacgctttttatttagctttattttaagtgaaaatgcaaagatctagaaatcataggtttgctaggctagttatagtttttagaagactgtgacattgtgaaatgtatgtttggtctttgacactgtttcctggtgtacagctcctaaaacccttgggatctccaaagggatgtctttttgcaggctaaggattgactgatggctggcagcttctaggtagcttcaggatgggggttggtcaccgggaaaaccaaggcatgattagaggtttggatttaaatcattgaccgttggtgatcaacttgattttcagcccctctgccctcccagaggttggggggtggggctgaaagtcgcaaccctcgaatcatgccttggtctttctggtgaccagtccccctcctgaagctacctagaagctgccagccacacccttctcctatatctcaccctttgcatctcttcatctgtatcctttgtaatattcttgtttcttttttttcgcctcccccccaccaagatggagtttcactcctgttgcccagactggagtgcaatggtgcgatcttggcttactgcaacctctgcctcccgggttcaagcgattctcctgcctcagcctcccaagtagctgggattacaggtgtgcaccaccatatccagctaattttgtatttttttagtagagacgggctttcaccatgttggtcaggatggtctcgaactcttgacctcaagtgatctacctgccttggcctcccaaactgctgggattacaggcatgagctacagtgtctggccaagacataattattaacattaacaatgttcatttgagtatactgcctgaaattatgtcagatgccaaagtgggcagtttgagaccagcctaagcaacctagtgagatccccatctctacaaaaaaagataaaaataagaaaattaactgggcatggtggcacctgtagtccctgctactcaggaggctgcagtgggaggatggcttgagcccaggaggtggaggctgcagtgagctatgactgaaccactgcactccagcctgggtgacagagcgagactctggttcaagaaaaaatgaaaaggaaatttaggcttcccatgatctggctctgggctccaggactgagagcctcctctgtgccctgctccactcccccaaaaattaatgtcctgctaaagccaaggagaagaccctgagaaaagacatcactcaccagccgttcagacatcggggtcttgtcatcatcaggcagatgctgctccagtgcgaggacgatgcaattcgctatgatggtggctaaaatcatatattcaaagggagtattggggaattaaggaaaaatcttgttcaaagaaaagaagggtgttggaggtgcacccacccccactgaccccagtggaaagatctcaagccctctagatccttccaactcatcagcacaggtggaattattcgttctcctgtctggagtagatccctgcagatctcaaacccagatcaggtgacttctaaagggaaatgtggatattcaccttctatctcacccacaatattcactgaacacatattcattcagtacctgctgtgtgccagactctgttctgggctagggacacagttgagagcaaagcagacaagaggagaagcttcctcctgcttcccagaggagaagcaaataaatgagatgactacatcatgtatactatgctatacagtacactgcatataccatgttatacagtacatcatatatgctatgttatgtagtaagatggtgaagactatagacagtggaaggggtcagggctgcaatttcaaatatggtggcagggccagcatgatggcaggcacctgtggtcccaggtacttgggaggctgaggcgagagaattgcttgagccgaggaggtagaggctgcagtgtacaatgactataccactgcactccagcctgggtgacagaaggaggccctgtctcaaaaaaaaaaaaaaaaaaagagataaattaaaaatagatagaggctgcggtgggtggatcacttgcggtcaggactttgagaccagcctggccaacatggtgaaaccctgtctctactaaaaatacaaaaattagccaggcgtggtggtacacacctgtagtcccagctacttgggaggccggggcaggagaatcgcttgaacctgggaggtggaggttgcagtgagccgagatcatgccactgcactctagcctgggcaacagagcaagactccatctcaaaaataaataaaataataaataaataagtaaataaataaataaaacattatgatcagatttgacacctaatgcatgatccacagaagaaaaaacagatatgctgggctttatcaaaatttaaaccttttgtgcatcaaaggacgttatcaagaaagttaaaaggcaagtaacagaataggagaagctatttgcaaatcatgtatctgataagggtctagtactatataaagaacatttacggccaggtgtggtggctcacgcctgtaatcccagaactttgggaggccaaggcgggtggatcatgaggtcaggagatcgagaccatcctggctaacacggtgaaaccctatctctactaaaaaaatacaaaaaattagccgggcgtggtagcgggcatctgtagtcccagctactcgggaggctgaggcaggagaatggcgtgaacctgggaggcggagcttgcagtgagccaagatcgtgccactgcactccagcctgggcgacagagcgagactctgtctcaaaaaaataaaaaataaagagagaacatttacaacacaacaacaaaaagataatccaattgaaaaatggacaggaggctggaatagacatttctccaaagaagacagtcaaatggccaatatgtacatgagggtattagtgatcagggaagtgcaaatcaaaccccaacgggatactgcttcacatccactaggatagctattaaaaacaaacaaacaaacagaaaacaagtgttggtgaagatgtgaagaaattgaaaccctcatgctggtgggaatataaaatggtgtagctggccagatgcggtggctcatgcctgtaatcccagcactttgggaggccgaggtaggaggattacttgagcacaggagtccgagaccagcctaggcaacaaactgagactctatctctacaaaaaatatgaaaaattagccgggcatagtggcgcaggcctgtagtgccagctacttgggaggctgaggagagaggattgcttgagccccaggaggttgaggctgcagtgaaccatgactgcaccactgcactccagcctgggcaatgggagtgagaccctgtctcaaaacaacaacaacaaaaacaacaacaacaaaaaaacaccagtgcaactgccatagaaaaccattccttggttcctcaaaaagttaatcacagagttaccatgtgacacacagtaactccactccaaggtataaacacaaaaggatcgtaagacaggtattccaacgaacactcatacacaaatattcacagcagcactattcacaacagccaaaagatggaaacaacctaaatttcaccagtgggtgaatggataaacaaaatgtggtctactcatagaatggaatagtattcagccataaaaaggaatgaagtaggccgggtgcagtggctcacgcctgtaatcccagcactttggaaggccgaggcaggcagatcacctgaggttgggagttcaagaccagcatgaccaacatggagaaaccccatctctactaaaaaaagtacaaaattagctgggtgtggtggcgcatgcctgtaatcccagctactcaggaggctgaggcaggaggattgcttgaacccgggaggcggaggttgcagtgagccaagattgtgccattgcactccagcctgggcaacaaaagcaaaactccgtttcaaaaaaaaaaaaaaaaaaggaatgaagtactgatacatgatagaacaggaatgaaccttgaaaacattatgccaagcgaaagaagcagacataaaataccccatattgtatgattccatgtatatgaaatatcccgaacaggcaaatccagagacagacagcagatttgttgttcctggggaatggcaagggaaatgggagtggctgcttaatgttttagaactagatgaaggtgacagttacacaacattgtgagtgtactaaacgcctctcccctcccctctcctttcttttcttatttatttttacttttatttttttaaagaaacacaattttgctctgtcacccaggctggagtgcagtggcatgatcatagctcaccgcagccttgaattcctaggctcaaacgatcctcctgcctcagcctcctgagtagctgggactacaggtgcacaacaccatgtgtgcctaattttttttttgtaagagacagagtcttactttgttgcccagggtggtcttgaactcctgggcgacctttcttcctcagcctcccaaagtgcggggattacaggcatgagccactgtgcccagccctaaatgtcactttaaaatggttaattgtgttatattaattttacctcaataaaaaaaaaattacagtgatcagggcagacctctgagaatctgttcttccaagacccgaggcaggggaggggtcgtccagtaagtatctctagatgccccatttgcattctctccagtttgcataggtaaactcctccctgcatcctgggaactgtcatttgggtttaggaggcctccctccctagtgtcccaccagaggatctgcagggcaggtggggagggtctatcttgttcatttcatattagctcctaacctgctgatcagctggtaaatgggaatgtccgctgtctccctgccacacccctcagaagtgtcccacgccaacaggctctgcatatggatctggcaatctctgaggaggtgtaagcgctggagaagcggctgcttgagtgaaaaagccatagggtgttggttactccggagcaggatttcccaacctcagcactaggtttaggggtggatcattctccttggtggggctgtctgggcactgcagcatgttcaacagtatccctggcctgtgtgtgctagatgccagtagcagcccctcctgtccagtgatgacaacctcaagtggtctctaaacattgctgagtgtcccctgggggcactgaaatcccgcattctgtagagagatcaattagtatgtcttggggaacttgaccatgctaaacctctcccctcctcgtagctctaacctttggaaaattaattggtttcagtctcctcttctgccctggagttaggtttggcattttggaagcaccataaaaccatcccttccaggccggagggagagtggaacctgctttccaggtgggaaaacggagtctgaaatagaaaccccctcagtaaaagtctcggaaagccaggaaaaccaggcttccttttgtcaccagcttcagcctttgcctccagctgaaagcacactctgaaaagcaaaatccgagactcagggcaatttggggagccaacaaaagccggccttgccgacgatcatctctgattggctttctgcctctgagctgacaggcattaggagcccagagaacaaagctgggctgtgttgcacaaatactccactctgcctcaccctgcagcctggaaaataagagacaatatttgtacacagagcagcaacgccaagcccttccctggtctcctctcgctatgatttgaagctgacttcgctttctctccctgccaactcagcctccttacacgcgcttctgccatcccactcctccggttccctggtctcctgcccctcaatggcagggatgtgacttcctttggaccggctctggcactgaaggttccaggaagagtcccagaagtccaccatgcagcatgcagcacttttatgggctgcaatatcagggtttcaactggccagtgttgcctggatttcagacccagggctctctgggtatggcaataaaaccttagcacgtaggcaaaaataaagaggttctactctcccaccttgcttcattttcttacttcttatcaaacacagatactcacactgcttttccaacatcatcccccctccctctgctcacccgcacccccgcaagtgtccacagacatgccccagatggacatctgcaacaatgacctcagacccttgctactcaaagtgtggtcccagaaccagcaccggttaggaatgcagccttagaccttgcatccacctgctgagtcagaacctgcatttaaaaagatcgccaggggatttgtgtgcaccgggaagtttaggaagtgctaagtgcctctatttcagggataggaggaggagctcaggtaattgcggttttgagtcatccagaaagaggtgggggttcctgtttctcctccaagctttctcctccacgttctgaccccagggggagaactgaacagccctgggtaccagccttctgctcccacttgggtaaagagcctgagaagaaaccgaagattttgatgaaataaaagcaatgttggaatgcgacaaaagcagaaaagaaaatttcagcctaatgcatgtggaagtattcaaagccttcccatggatcccatctcactcaaaagcaaaaacaaagtccttccagcaccagcaaggtgcatgacctgctcccattacctccctcccctcatctcctctattctctcccttagtcactcagctacagcaacgccggcctcccttttattccccaaactccccaggcacatttgtacccaggggcctttgtacctgctgttcattctcctggaatagtctttccccagacatccacatgactccctccctcacttcctttaggcctttactcaaaggtcacatccatcaacccccttagcctgcttatttttttctttctttagtccccgtccccagtcaagcatctgctatttttttccttctttatcttgttccctgtctctcccacgagactgcacactctatgcacgtggggattttttgtctactttgttcactgcttcatcctctgtgcccaggagagcattctctatatagtagatgctcaaaaaacaccagtggaagggcctggtgcggtggctcacacctgtaatcccagcactttgggaggccgaggcgggtggatcaccagaggtcaggagttcgagaccagcctggccaacatggtgaaaccccgtctctactaaaaatacaaaaattagctgggcatagtggcagacgcctgtaatctcagctacttgggaggctgaggcaggagaatcacctgaacccgggaagcagagtttgcagtgagccgagataacgccactgcactccagcctggacaacagaacgagactccgtctcaaaaacaaaacaaaacaaaacaaaacaaaacaaaacaaaacaaaaatcaccggtggaggaaatgaaggaaggggacatgggtcctgctgcctagaaaccccgacttcatctcaagccaagtctccatgagcatgttaaggacacaatgaaaccccctgaaatatgcaatgatgtacttggtgcccagatgaaagaaagatgggctgctgagttcttggcatggtaagagatgcctcgcccgaggcagaagccaaaggtttcactgggtagtcgagctggggggcaggcgaggctttctcagcccaacctcaagtcatgcctgatcctcccgatttagaaagcctgagttctaactcacagctgcggtgagcaatgcctctgttagctgagctgagcctttctgctccctgattggctcggagagaaagcacctgtgtcagcgggatccagaaaaatcagccatcctaggaggccaaagcggggcgggggctgaaagaagagaagcatccctgatgggaggaaaagctggcttccgaaatggctctcggaagtcaggatagcagacagccctgcaggcaggtgaggagacacagagctctatacacaatgaaattgatcaggacctgcagaggccccagagagaggctgtatgtgaccctggaaaagaccaagtttgactctgcgtagggaagaaggagggcttgcatctgagaacaggaccttgctcttcagattcagaacatgaaggaaaattctcaaagtgggcgtggctgatggttcccatcccttagcaagaccttgcagtgtccaagtaatccttgcatccctctgtggtgcccttcaccctcatctcatttcaagcctcctgtggttggtgcggaaatcaaatcaggtttgtcaactctttgtgaccttgtctccactatggggactgctgatgggtgggttctaaggaaacagatacttgtagcagttagccaggtcattgagcttgtgtgaagaagccaaacagacctcattttcatgtaagttccatgctcatcacaatcaccaggaaaaagagtagagggtaccagaaccctagatatatgggtttaagacatattccttggtccattaaacacataccccaatttcactctgcaatatgatcaactattatggggccattaacaagcacagcgaccataattacagctgccttgtttccaactgcttctttgggcagataccgtggtaagcactttgtttcagttaattccttgcaacatttctacaaggtgggttctgtggtaagcctcattttccacacaagaaaatccaggctcagagagattaaacaaattttcaaggtcacataggaggtactggcagagctggggctcacacccaggtctgcccaactccacagtctatgcctttttttgtttgtttgtttgagttagggtcttgctctgttgcccagggtgaaatacagtggcacgatcacagctcactgtagccttgacctcccaggctcaagcgatccacccacttcagcctcctgagtagctgggactataggtgcatgccaacacacctggctaacttttaacatttttgtagagatgagggtctcaccatgttgcctaggctggtcttgaactcctgggctcaagcgatcctctcaccttggcctttcaaagtgctgggattacaggtatgagccactgtgcccagcccacagtctatgcttttaagctggtggtccccaaagaccactcaggagctatcctggttagaagatagatgggtttgcctttatttaaaaaaaaaaaaaaatagaatgcaggtgcacttggggccctaaccatatggattagaccaaatgggttacacctcacccaagtcccaaccaatggccacagtttagtaaaggccaaccattgcatgctagtccacgccctcataagcccatctcaagtaggaattattcatgactatttcaacttcaaacaatccaaacagtctccagttcccagacatgggctttaaaatcttcaacacacagttctaaccaaaatgaagcctggaaaagatctctccactcgctgatcagcctaagactcttagcagggatggcatgctaacaagggcaaccctagcgctgcccgggatgttttcagcaccacggccagcggcaaagaggcacaagtttaatttcacttgcacccagggatgggaatccccggggagagaaaacaaaaccagcagcaactattaacactctctgagacatctgcaaagacctacatttcacatacagggtagaggcaaaaaagattaatcatgtcatcaggaaaatcaaatgaagagaaaattaaaaacagtatcaaataggtttgtgtgtcatttgtttttcatattatccaacaatgtccaacactttggttctgaaatgagaagtctactcagggctgctaaatcatgcttctgcttagaaaactggcaatatctgcactaaaaaatagtagtgcagaggagttgaaaggatttggggatcagacgtggccttgaccttgggcaaggcagtttccttctctgagcctcagtttcctcatatataaaaggtagaaaatagcatcaacctcataggttgtgtgagaatggaatgagctgatacacacaataatctattacagggccctgcatatagtaagtgctcaaggaatgtgagtgttttatattgtttattttggttcccatgatgactagaaaatttaatgtgggccaaatgcagaggtagatgcctatcatctcagccctttgggaggccaaggcagaggatcgcttgaggccaggagtttgaggacagcctgggcgacacagcaagatcctgtctctacaaaaatacatttaaaaataagaaaactagccaggcatgttggcacatgcctgtagtcctagctactcgagagactgaggcaagaagattgcttgaacctgggaatttgaggctgcattgagctatgatcataccatggcactccagtctgggcaacagagcaagaccctatctcttaaaataaataaatacatacatttttttaaaaaagaaaacttaatatgcttataaaaacaggatacaatttatctcattgtaatcatgcaataaatgttcattactttatgacaattgctgctaatagtaaataacttttccaattttttttttttttttttttttagagaccgagtcttgctctttcgcccaggccagactgcagtggtgctatctcggctcactgcaagctccgcctcccaggttcacgccattctcctgcctcagcctcccgagtagctgggattacaggcgcctgccaccgcgcccggctaatttttagtatttttagtagagacggggtttcaccgtgttagccagggtggtctcgatctcctgaccttgtgatctgcccaccttggcctcccaaagtgctgggattacaggcgtgagccactgcgcccggccaacttttcctatttttgcccttctaggtcttggttccttttcttttctttccttttcttttggtttcttttcttttctcttctcttctcttttctttttgagacagagtcttgctctgccacccaggctggagtgcaatggtgcaatctcggttgactgcagcctccacctcctgggtgcgagcaattctcctgcctcagcctcccgagtagctgggactacaggcgtgcagcaccatacctggctaattttttgtattttttagtagagacatggtttcaccatgttggccaggctagtcttgaactcctgacctcaagtgatctgcccacctcagcctcccaaagtactgggattacaggcatgagccaccgcgtccagccttagttccttttcttcaaggagggagggaagggacaatacctaccgtcatcatagctgaacagacctctcaaatctgaaatgtttccaagaacatactgcagtgcatgcatatgtgtggtccactcactgaatattatactcaaaataaatgttgccaaaaaaaatcttcattggacatttcatgtaaatggaattaaacacgatgttgccttttgtgtctggcttctttcactcagcatcaacttttttgttttgttttgttttgttttttgagatagggtctcactctgttgcctaggctggagtgcagtggtatgatcatggctcactgcagcctcggcctcctgggctcaatcgatcctctcgcctcagtctcctgaatagctgggactacaggcacatgtcaccacacctggctagttttttgtaaattgttttgtagagatggagttttgctatgttacccagggtggtcttgaacacctgggctcaagcgatccgcccacctcagcctcccaaagttctgggattacaggtgtaagccactgtgtccagccacatcatatttttgaggttcatctatgttgtagcaaagattagtatttcattcctttttaaggcagactaatatctgaggaaggcatatcacacttggtttatctgttcatccatggatggacttttgggatatctcatcctgttgactacctagaataggtaaatccatagagacagaatgcagatgggtggttgccagaggctggaggaaggtggtggggaggggagaaggagagagactgcttaatgggtacaaggtctcctttaggggtggtgaaaatgttctggagctagacagaggtggtagttacataacagttggagtgcagtaaatgccacagagccgttcactttaaaatggttaattttctgttatgcaaattgcacctgattttttttaaattccattttggttttgcttttttttttttctttccccttgactctctcctcagggttcccatcatgggcctttactcattgcactttaccctgggcgacacagtgaggctctgtcctttttttttttttttccttttctttttttttaagacggagtcttgcacctaacctgggtcagcacccaggctggagtgcatggagtgcagtggcacgatcttggctcactgcagcctccatttcctgggttcaagctattctcgtgcctcagcctccctggtagctgggactgcaggcacccaccaccatacctggctaatttttgcatttttagtagagttggggtttcaccatgttggccagactggtctcgaactcctgacctcaagtgatctgcccacctcaacctcccaaagtgctgggattacaggcgtgagccaccatgcccatccgagactctgtcttttaaaatactgctgctgctgctgctactttcttcaataataataataataatcatcatcatcatcatctgaccacgcatccttgtgcacttgtgagaatttttctgcagaataaattccgtgatgtgaaattgctgattttttttcctctgagccctcaaccatttagagaagcatgatatggacggttttcaagagtccttccctctctcttttaaatttccattatttatttatttatttatttatttatttatttatttgtagagatgggtctcgctatgttgcccaggctagtctcaaactcctgggctcaagctatcctcctgcctccccacctcccaaaacactgggattacaggcgtgagccactgcatccagctacagggaagttaatgttttaataaaagctggaggaggcaagggaatgagccctgtttctgtctgggagaagagtaacccaggaggggaagcagccagtacaaagaatgtgtgtgggaaaaaatttgaaagacaaacacgaaattgctagcagaggttatctctgggaggtgggatggggtaagggcttttcaccttctaaatgacacactacacattttttaagcttttaaaaaaccacacaaaacaacaagcccatattcttttcataattaaaacctttttttaaaaaaagggggatgccaggcatggtggctcacacctgtaatcccagctactggggaggctgaggcacgaggatcactcgagcccagaaggtcaaggctgcagtgagctgtgatcacttcactgcactccagcctgggtgacacagtgagaccctatcttttaaaatgataataataactatctcaccatacatccttgtgcacttgtgataattttcctgcagcataaattccaagatgtgaagttgctggatgtcagaggggatgcacactgactttttcttttctttttttttttttgtgagacagagtctcagtctgtcgcccaggctggggcgcagtggggtgatctcggctcactgcagcctctgcctcctgggttcaagtgattctcctgtctcatcctcccgagtagctgggattacaggcacctgccaccatgcccagctaatttttttatttttagtgaggatagggtttcaccacgttggccaggctagtctcgaactcctgacctcaggtgatccacccacctcggcctcccaaagtgctgagattacaggcatgagccaccatacccggcccacattagatattttctggatatttacagggctatattttacagtttttaaaaagtgagatgagtgagtgtgtgtgtgtgtgtgtgtatgtaccttctgaaattaaatccataatttaaatgtataaattcctctgggccaaaaagtttaaacatggaagaattaacatgactcatggaaaacacacaaatacacaaaagtaaaataaagatcccttgatgaaaacagaaagaaaaaacaaaacaacaagccaagttttaaacaaaaagtattaatcaatttcagactctcggggtcgggaagagagtgaggagtgaggatgcttcagtgtcagattccaaacaagaactgaagaccttctccctgtttatctttttttctaggtcagtaaagttctctagggacctctgagtggtgtgaggtctctgtctcctgattcaattttcaaccactttcccttatatgttcactctaccaagggggaatccttttcctctctggcaatagtgacatccctgttcagtggtcagtaaaatcctccatttccctggtctctctctacacagtccatctacttcatggtttaaacttaaacctggaggtcaggcgcagtggctcacacctgtaatcccagcactttgggaggccaaggtggccggatcacttcagatcaggagtttgagaccagcttggtcaacatggtgaaaccctgtctccactaaaaatacaaaagttagctgggcatggtggtgcgtgcttgtaatcccagctacttaggaggctgaggcaggaaaactgtttgaacccaggaggcggaggctgcagtgagccaagatcgtgccgctgcactccaacctgggtgacagagcaagactctgtctcaaaattaaacaaacaaataaaaaacctttaacctggaaattccctgcagaccatcaactctaagaccaaggtggggccactggcagcctcaaattagttcctaagaacaaaaggaaagctcagctctggaatatgtccaccatcatggcccccagaaaaaccagtgagaagggccccaagaaagcaagagaatcaaagaaagaccttcccaactcagataaggtggaaaaggtgcccccaagaagtcaggtgaggtgaggagggctccctcaaaagcaggtgtagccaagaaggcccccaagaaagtcagcaaagccaaggaagtcttccttaaaccagccaatgccatgaaggtccctcccagtgctgctgggctcaatgggaagtccaaagtcagaggtagcaccagcagccaagatcctgagatccacaggaaaacagaagctgggagctaagactccgacggaacctgttaacatttgatgacctccaatttccctgtggagagaccattgtccatgctggtcccctgcttccttgatcactggaggatgtccctacctcttcatcaataaccaatgtctcctccaagccactccagctatgcatgctcagaagctacaccagccacctccaaaacacctgtttccagcatccttgtcttgaaccacctcttttttttttttttttttttttttttttgagacggagtctcgccctgtcgcccaggctggagtacagcagctccgcctcccgggttcacgccattctcctgcctcaggctcctgagtagctgggactacaggcgcccgccaccacgcctggctaatttttttttttttttttgtatttttagtagagacagggtttcaccgtgttagccaggatggtctcgatcgcctgaccttgtgatccgcccgcctcggctccccaaagtgctgcgattacaggtgtgggccaccgcgcccggctgaaccacctcctctttaaccacctcccagctcactaactcccttaaatgcaaaccaacgtccatcccatcgagccctgcaacccactgaccccgccatttctcaggaccctctcctgccttgtcaaccttacataggttgattatatcgcactttcttgcctcctgtttctctcctggaaaaaatccatccctgcatgaactcaactagttgccttccccatacctgggcagtggagcattcctgaatgagatcaactatctgggctggtgacattaaattcatgatgctaaactcaaatgggcatttgagaatcccagcatcctatatcagagaagacacccgtgcatattggtataatggatgggaatgacccaatttacagaaatcaatattcttccatcattaaaacctccacccttgactgaaaattttccttcagccaccaaccaatttctctactccccttcatgaagagttgccttcacgtgttcctgccacttcctcactgcacattcttctcctaccctccccaggctggtttctagcccccatcactcaaccaaaactcttccaaagaggatcaccaaagacccccaggctgccaaatcccagggccatttttctgtgcccagattacttgaccatgcccttcttaatgttgttctagttttcctcctatcctcctggtctctacttctcaatcttccctttttgctcctctttttctatccaatctctaaatgttggtcttccctggggcttaatcctaggtaatcaccctttatctatctctatcctctttctagagcttgcatgcatttcgatgtattttgccattctcttgttgccctttctccctaaaatatccactcattgccctgtttggcatcctggtagaggcagggctgacttctgtgactgcatcatccaagccctgcaacgctgccctccaccacatcttctgccttctgggttggcttggccaacgggaggcaccagcaagagatcagagaggagggggagttggggcatttctccatttgatttcctccctgctacagtgtgtggtcttagcaatagctataccactctgtgtcttcttagagcatctcataggagtgtctatattagtctcctagggcagtcatgacaaattgccacagattgggtggcttaaaacaacagaaatttattctctcgtcatcctggaggcaaggttctgaaattagggggtttcccttcaaaggctctaggggaggatccttccttgcctcttcccgcttttggtgcctctacatgtcttttggcttgtggctgcagcactccattctctgcttctattgccacatgactttctcccctgtaccttctcatataaaagcacttaccatggaatctcgagtccactgtaatccaggatgacctcatctcaatccctgactcaatgacatctgcaaagatcctactttcaaatgaggtctcaggttctgaagttccaaatgcatctgaatttttggtggacaggattcaaaccactacagtgtccaaggcccaaactcttccattccctccctaatcccatgtctctttctctattaacctttgttatgaattgtaccaccagctgcctagtaaggagctcaatcaggtaaggttaccctaagagaccttcccagttcctacatcttcctccccctacagctgatgtatcatcagaccccaccaattctacttccgaaattagactttgaatcctcctgctcagcattgcctcttcagcaccacccaaggtcaagccactgtcccttcccacagaaatatctataatctcagtagactccaaagtggtctatccatttcattctccagagagaagccagggcattatgctaagtgaaagaagccagacacgaaaggtcacacagtgcctgaattcatttatatgaaagagccagtataggtaaatccatagaaacagaaaacaaatttgtagttaccaggagtggtgggggttggggggataccgggaggggaggatgaggagcaactgcctcatggatacagggttttctggaggggtggtgatgaaaatatttcagcactagaaagaggtggaggttgtacaatattgtgaatgcgctgaatgccactgaattgctcattttaaaatggttaacttatgttgcatgaatttcacctcaatacaaaaattattttattgagacaggatctcactctgttgctcaagctagagtgcaggggcacaatcacggcttactggagcctcaacctttggggctccagcaatcctcctacctcagcctcccgggtagctgggactacaggtgcacactatcacacccagctaatttttaatttttatttttatttgtagtgatggggtctccctatgttgcccaggctggtcttgaactcctgggctcaagtgatcctcccacctcagcctcccaaagtgctaggatcacaggtgtgagccaccatgcccagctaaaaaatatatagacaggtagatagatatgtatatatgtatacatatatatgctttatatatgtaatattatatgtttgtatatatgtatatatatttaaagtaaagcagttctgtcccatcccacttaagcttctctgaggacttctcattgcatgtagaataaagttcacctccggaacttgacctagaaggtcttgtgtgacctgtctctgccaacttcttgggtgtcttcccacctgtgagtccctttgctcatcagactctagctacactggctcatttttaacatgatgaacttgttccttccccagggcctttgcacatgctgttccctctgcctgggattctcttcctccctctgtctcattctgttcacactctgctctgtgcttaacaaccttcaggtcttcacttacgtggtacccctgtacttctaattatcctctacgcaaagggcctgtagtaggttacttattttattttatttttcagagatggggccttgctctgtcacccagcctaaagtgcagtggtgcaatcatacccatgctttagcctctggagcctctggccatgaccttatttagtaaaacggcctctgcaagtataattaaattagagatctcaagatgagattgtcctggattatctgacgggctcaaaatccatcgacaaagatccttataagagacagaagaggccaggtgcagtggctcacacctgtaatcccagcacttcgggaggctgaggagggaggatcacttgagcccagaagttcaagaccagtctgggcaatatagtgagatcccatctctatcaaaaatttaaaaattagctgagtatggtggtgcacgcctgtaagtcccagctgctcaggaggctgaggtgggaggattgtttgatgctgggaagcagcagttgcagtgagctataattgcactgctgtactcttgtacagggtgacagagtgaggccctgacaaaaaaaaaaaaaagagagagagagaagaggaagagaagacactgacatgaaggagaaggccatgtgaagacagaggcagagactgcagtgatgcagccacaagccaatcaagccaatgtatgctaacaactaccagaaactggaagaatcaaggaagcattcttctctagagccgtccaagggagctcagcactgctgatgccttgattttggtcttccagccttcagaactgggtgacaatatatttatgttgttttaagccatatagttcatggcaatttgtcctggcagccctaggaaacaaacacaggaccctgctggttttctcccaaacacttaccacaattagtaattatgtctgtatttgcctattccttattttatgccttcttttcctgttacaagttccaggagggccaggaggaaccacatctgtcctgcccactgtcatgtccccaccatgtacatcccagttccaggcacatggcaggctcccccccacccccctgcctcccaaaatgtttattgaatgagcaaatggatccacctctccttcatttctctttacatctcagcggcagtccttcttgcatcttccaccttcacttctaactctgagctgttgcattagcaactccagttaaacagattttctggaaagccccggcctcccaatgaaacctccctcacttgctccccactgcacttccccaaatatttgggtctgcctcgccttttccatcactggttctgccatccatgaagattctccttgaagctttatcattaaaaaataaacccacatattctgtgtctccaaaagaagcttttacttttgcaaactctattgatttaatcctagaggctgctggcagcagtcccaggagcttaatcaatatgacaacacccagcgcagacagaacatcaaggagcctcggccaagatctcctgctcgggtcttcactgaccccgactgaatctcttacaaccatgaagacagatttacagtagggggcaggatatttgcaacagctccaggatcttgcttaggtgagcaaaaggaaatgcctccaagcttgaggcgcttcagagctatttgttaatttgcgactatggccgattcccataagactcaaggaagatggaagacaacaacagaaaaacattgcaggttctagaacctgattataaactccctggtggggtgagcaggggaggaacaggcaaaggggaggtgggaaaaagaagatgaagatgtcaagagttaaaaatgcaaagagtttgccaggtgtggtggcttacgcctgtaatcccagcactttgggaggccaaggcgggcggatcacaaggtcaggagttcgagaccagcctggccaatatggtgaaaccccgtctctactaaaaatacaaaaattagccgggagtggtggcagacacctgtagtcccagctacttgggatgctgaggcaggagaatcacttgaacccaggaggcagaggttgcagtgagccaacatcacaccactgcactccagcctgggcaacagagggagactccgtctcaaaaaaaaaaaaaatgcaatgagttaaaacagacattccttcaccccttagcagacactaagtgaccagagaaggagaaaaaaaggtcatagaaacaaggaggttgagaatgactaaatcaatgccccaggctttagaaaccattaatctcctcgaaggagaagtcaaacacttctcacattttattcaagattgaaaaacaggaaaattagaagcactataggaagaaattggaaagcaagaaatatttgttaatcagaagtttacatgcatgtgacatttccaaacctattgagcccttataggaaaatatgaatatccatccctaaaacatacatcaacataatcttcctggagacactgtgattagatatcagccccaaaatgcagataatgaggtatacagtcagcctagtctatgtcctgctgcagtaacaaacaatccccagatctcagtggttgaacacaccccaggtctatttttctactcatgctatgaagtgggatggggactgatctatgtcatcctctctccagcacttactttgagagagggtccatctttgtgcatccatgacagtggaggcaggaaaaaggaaacatggtgaatcccatgctcacccttaaggcttctgtccggaaggactcacgtcacttcccctcacatttcattgatgaaaccaaatcacacagccatacctaacttcagggaggtggggaaaatgacactctactctgtgcccagagaaaaacaagaaatgttagctgaacaaggtaaaggataccccctcaggaagatcatatgacttgcccaaagtaaagcagctttgaaggtgtcagaagtgggacctgaattcaagactaaatggtccatgtctttttgcactatcaccctgaacttggcaggagttgagaattaaatctagatagcagtgaagagaaacatcaatggaggcagggggcagaaggaacaagggaaaataatacatcaagtaagggagaaataaaaggagccagaaaattacaaccagaacataattaaaggagtttcatctttagaaaccaaaacacattgtgaaaagtagggaaaaagtgggggagttttacactcttttcagggagaggcaaacagtaacgggatagtgcaggggtttatatgaggctatataaggaggcggggacacaaccatgaaagaaacttgtacacttcttgttcttcctctgaagctgccatcttggctcagactgaaggtccaacaaatgctagttggtgcaacagcagctcaggaagctggggccagggcttaccaggacttccatcagctgcactgttcctccctggacattttcctgctcagttctgggaaatctggacaagagttggatgatgttccagaacagatggtgctagcttggttcttctgatcattcctcccctatccctaacccaagccagactggaagtaagaagggatcctggttctgccaccctcccggccagcaggtgagaattctacacagccaggtaggtcagtttagcactagagcagggattctggaaggactcaccatcattgccaactcatcatcaccatttcagttttgagcacctatgatatgccacctgagtactttctgtgcatgaatgcattgagccctcaccacctgtctgcctagaaatcctactggtcaactttcaacttatatccagaattagtagtttccagaagctgggggaagggagaaactggaagtaactactaatgggtgcagggtttcctttaggggggatgaaatgttctgagattaaatagaggtgactgttgcataacagggtgactgtagtaagtgctgtggaattgcacacctcaaagtggtaaatttcattttatcacaataaaaaaattcattttatcacaataaaaaaacttaaaaattataaccagaatccagccactcattattatctccacagacaacaacctggttccacccccactattacctgccaggaccaacactgtcacctccttcctaattccccagcttctgccctgcctgcccccaaccttcaaagtctgttcttttcacagcagccagaggagcctatgaatatctgagtcaggtcacgtccctcctctgctcaaaagccctccgtggctcccagctccctcagagcaaaagccaaagtcctccccgcagcccataaggccctccaaaacctgtcccgtcacctctctgtccttatccttgcaccttccctctctcttgctcactggcttcagccacatctgcctcctcactgtcacacatgtcacatatacccctacctcagggcctttgcaccagctgttccttctttctctagacatcctcacagcttcctcaagtcttggctccaatgccatcgcctcgataaagctctatctaatacagcaactgcctccccagccctttctctgctgttctcttcccattacccttataatcttctaaagtactatgcaacttacctactatttttgtttcttatcatacatctctccccatgagcatgtaagctcccagagggcagggacttttgtctgcttcctgtgtcttgaagagtgccttggccaccatgtatactccttcagtgtttgctaaacaaatgcacagccccatgaggcaaggactgttttgcccattttatggaggaggaaaactgagactcataatcaggtatgcagcagcaaactgtctgaattcacagcccaaactcaacacagcgatcgttccttattattattcacacagcaaagatggaccaggcagtgttctaagggctggggatgcaacagaagacaaaatagataaagctgagccctcatggaggtgatgctgtatctggttcagttgtttcctgcccaaactctcatccactctcacttttggctctgacagtggcctctgagtaacacagtgtgacatgccttcaactatgatctgaatgttctatagaagccgcctttccattatgcaactgtggtggcttttcttttgttatacgacgattatttgtcaaccccactatctttgcactcaaccatgggccccctgggctcagagacctcgtgacagtcatcttctcatcaccacatctgcaaatgtgtgggtggatggggcagcaacagtccacctcctccaagaagcagtccctgatttttcctccccagacaaatcttcgtctctctgttcttggaaactcaaagaactaagcacctccctcgagctgctgtgcaaatgtgtgtgttgtgttttatttggttcttccgtattttcactctggaagtcgacagttctggccagaatgccacccgcccccacaaaataaacatgtcattgtgataaatgttatgaaagaaatggggtgaagtctaattcagacttggggtgagttgctgggtcaggaaaagctctaaggatgttccttttaagaggaaacctaaaggttttattattgttgttgttgctgtcatttttacagacagggtctcactctatcgcccagcctggagtgcaggacgcgatcactcactgcggtcttgaactcctgggctcaggcactcttcccacctcagcctcctaagtagctggaactacaggcatgcattgccacgtccagccaattttttatttttttgtagagacgggtcttgctatgttacccaggctggttttgaactcctggcctccagcgatcctcctacctcggcttcccaaagtgctggggttacaagcgtgagctaccacacctggcctaaaggatttataagggttcaccaagtgaagaattgggcaaaggtataagtatttcacagcagctttgttcataatggcccaaacgagaatcaacagaaatgccaatcaacaggtaaatggataaacaaactgtggttatttccagatgaatgctattgagcaacagaatgacagaagccacagtgctcactcatccaacacatatttatcaactgcttactgcatgccacctgctgatctaggctgttctagtccacattggtgggtaaaaccaaaagatcaggtgtggtggctcacagtaatcccagcactttggaaggctgaggtgggtggatcacctgaggtcaggagtttgagatcagcctggccaacatggtgaaaccccatctgtactaaaaatacaaaaattagccaggcatggtggtgggtgcctgtaatcccagctactcaggaggctgaggcaggagactcacttgaatccgggaggtggaggttgcagtgagcccagatcgtgccaccacactccagcctgggtaacaagagcaaaacctcatcttcaacaaaacagaacaaaaaacgaataaaatcaccttcccttgtggagatcatagtgatgtagggtgacagatagcagacagatgagtaagtaagaaggtgaaaagttccaaaggggaaaataaggcagaagggcgggaggcaaatgctgagaaggtggcctttgagtgaagtcctgaaggagaggagggagaagccatgaggtcacctgagagaagaacaatgcagacagaggaaacagccagtgcaaaggccctgaggtaggactgtgcctggtgtgtctgaggaagagtaaagacaatggcaggagctgggtgagtgaggccagagatgctcgtgggcttttccaagtgatcttctcgggctttctcccaaggcagagaaaatcagcaatgggaaaggaaaatggcaacttctggagcttgggaagaaaagaggaaagaggaaagaaaaaacgaagagagggaagaggaggaggacaggcctgagctcagagtcctgccaccttcactcttcatgtcttatcagacaaacaagcctggagtcaggagagcccatgtcccagtggcctgccatgctgtcctaaaagacagaccaacagagagaaagaaaggctggcctttaagaaaggaagggcaaagaagaacataaacaaagcaacagaaaaagtaaagctaatatataataacatatactataccagccgttgacaaactctggcccatggcttgtttgtgtaaacaaagttttattggcaaatggccatgcccattcatttacgtattgcctgtagctgcctttgctataatggcagagtagagtggtcccaaagagacagtatttactagacattttctagctaatcctttgcagaaaacattttctgatccccgtactataacaataacatacaactatattagcatattacgtatttgtagcatatatagttgacccctgaacaactcaggtttgaattttatgggtccacttatgtagatttgtttccaataacagttacaccaagcgtgcttgtctttctggcctccccttccacctccacctctgccacccctgagacaacaagaccaactcctcctcttcttcagcctacttaatgtgaagacaatgaggatgaagacctttataatgatccctttccaattaatgaatagtaaatatattttctcttccttatgattttcttaaaataatactttctcctccctagcttactttattgtaagaatacagtatataatgcatataacatataaaatctgtcttcatcgactgtttatgttactggtaaggcttctggtcaagaatagactgttagtagttaagctttgggggagtcagaagttatacacaggctgggtgcgggggctcacacctgtaatcctagcactttgagaggctgaggcaggaggatcacttgagcccaggagttcgagatcaacctgagcaacaaaagcgagaccttgtctctaattttaaaatttctaaaaaatagagaaaaaaagttacacacacatttttgactgcacaggaggtcattgccccaacccctatgttgttcaagagtcaactatatttatctatgaatatataattacataacataaaatggtttattactattataaataacatgctgagttcttaccatgtgctgggcactgggctaagcttttctgcctatgctcttgtattgaatctgatcaaaaactcatcagattaggacaatattattattgttgttattattcattgagaccgtggactccgaatctagatagcctaggctgaaatcccacttttgttgcttgaggggtgcaagacctcagatagtgagtctctctctctgtttcggttttctctttttgttacacgggatgataacagtacccacccctcagggcactgaaaggatgagctaaattgatgcaagcgaggtgcctggcatattgaccagaactctcattaccatggctgtccttattttacagatgaggaaactgaggcacgggaaggtgaagtcatgggcagccaccactgccagaagtggagagctggcaaagttggggagagggtgataaaaactaggaatcacggctctcatgataggtggacctagaagacagcactggggaacttggtcctgtctacctctcacctcattgtcctagacctgggagtgggcagaaggcagggacctgctggtcagctgccagaggcaatgaggggttgctcttccgttctccatggaggggaagaaggccggttaagcttgaatggtggaagctaagacagtgacagccctatcatcacagatccttggaggagttcaaagaagtgggtggggcggggaggggacagaccattgttacagccgctgggctgaccctgggggctggagatgaggatgcacggccagtacagctggaccagattggagtcaggcgggctcacaccattgttaacatgcccagcttcaacgtcacttgtatacctacttctggttgccaagataggctacaaagaggtaggagcaggtgaggggcaggttgcttcctgcccctgggacccaagtccacctccctggacccagcctgagggaccgtttctaggtttcacctccaggaaagtgactgcttggttcaggcagcgatcacttgctttctgttctgactccatcaaggcatctttccccacccagcctcaggttaaggtgaggggcttgccaggggcacagactgcctgcagagacccccactatctcagttctacctcatctcctggagaagacagctatccaagcagaggaccccacactcaagcttggcatagaatttatctcccttggagaacacggaaagattttcacttaaagggaaagaatttgcagaacaaggaaagaagtaagggagaaaaaaagaagagagcagatactggcatgtagagggaactaagaaccaataaccatcaccaccactgctaccaccaataataagaatagcagtaaggaggccgggtgcggtggctcacgtctgtaatcccagcattttgggaggctgaggcgggcggatcacgaggtcaggagatcgagaccatcctggctagcagtgaaaccccgtctctactaaaatacaaaaaaactagccgggcgtggtggtgggtgcctgtagtcccagctactcgggaggctgaggcaggagaatggcgtgaacccaggaggcagagcttccagtgagccgagatcgtgccactgcactcccgcttgggtgacagagtgagactccgtctcaaaaaaaaaaaaagaatagcagcaaggcaaaccttctttttcttttttccacctgagaacctagtttcactttgtgaaaaagacaaagtgacgtgtccactaaaccttcttctccatggactgaatttctcagttccccctgcagtcagatggaccatgggtattggctgtcttccattaccccaaatccactctccttccttctttacccttctaggactgtcacatggggggctgacctgtgtggatgggctcactgggctcccagccctctggctttggacaatgggggacatttattctgccagcttcctgttaggaaatgctccctctctctctttctctccccccttctttctctcaacttgtgtgtgtgtgtgtgtgtgtgtgtgtgtgtgtgtgtgtgtgtgtgtctttgtgagtctcagtctctctctgtctctgcctccttcctctcttcctccttctctatttcagtaagggcccacacctttgtaagctatctcttaatttgattcttaagctatctcttaatttgattcttggtctgtgtcttccgtttcctactgggaccctctctcatacaccatgggatgaaattccagtccacagaatgcaggcagaagtaaggttcactacttctatatgtggcctcccaaaacttcctgtgtgagccttcatactcttttcctacaggccggaagtgaaggactttctgatcttaggggatggtggagccacagatggaaagagccgggtcctgaaatcaccacatggaatgccacttgctgattatctgattggatttagggtgagtgagaagtacattcgtattgccttaagctactgcagacttgggggttgcttgttacagcagcaagcatatcctaatacacctttaagaagactgctcttccccacttggagaagttggctccaccccaactccataaagtcatgtgacccaagcctaagccaatcagagcaccccgttctccacctcccatttccccacagtgattggttctggcatgagcacacgacctcagcaacagccaatcaaaagcaagaaagcatttgctgaaaattccgggaagatagctgaaaaagagagaagaatctctctctgaatatggtcttgggcagactggagggctggaagtgcagctaagtcatggataatggagccagctgcaaaaagtagagccaagaaacagaaacagaggcctaatggtgttatctgatccctagatccaaacaagcctgaagctggacactcctgagactcttcagtctcatgagccaatacaatccccacttcttgtttaagcccctttgagttttccacctcttccaagtaaagggaactaagggattcacataggtaaatataatgagtccacaccatgtgtcaggcccactgacctcacagcaagtcaacaggtagatatttttactttaattcccattttataggcaaggaaatggggaccttttaaattggccaggagcacctcagtagggaaattatttgcaaaagagtatgtttggggattgggtgtgtgagcttgagtaattgggattgggctgaaagtccagaaaccaatcctgaaaccaacatcttttgtatgatttcaagagtgccaattaacttcccccgttctataaaaaatggagataaaaacccttccacttctcccccaccaattccatagtgtcggtttgggtaacaaagtaaggtaacagttaaaaggtgctctgaaggaaaggctagcaactcatccttgctgttgttaataaacagtcattgttgaattggctccagaaaccctgggggccaggggctgtccagtgactctcttggccagaattccaaagaccatctgtggcaaatacatcctccagagcacatacccttggcaggatcacaaactgcttttctcacccagaaaacacaaccagaaaagaaacagagatagagagaggggagagaggggaaaaatcatgccagctcaaaatttcttttaatctgatcaatgatttccatctccacagccaccatgccagcccaaggcacacttccctgaatgagtgaaatcatttcctaattggtctcatggctttttattcttgctgtattccaatacattctccatgcagcaaccagtggaactattcacagacataaaatcattgtattactgcttcagtagcctgacagtgcctttaggataaatatcaaactcctaagcaccttccacaggacctttgcacatgctgttccctgtggccaaaacatcttttccaccattcccacccctacaatagcagaggcccactaaagactcagtttatcagcacttccctggaagatgttgtttcacatgtttcttttagagcaagccagacttgtccctttttgcaaggcctataacattttaaattataagtagtaataactatttacatgtcatccttgccagactgtaaactccatgaaagccatgattgcatctgtcatatccgtcactgtaactcagtgcctggcacacagttggcactcaataaatatttgtggcttcaaaggttgagtataaaaacagaccagatgaaagaaggtaaaagttaaacagtcaagaggttgtcttgcagatcattggggcaagaatgggctttttaataaatgatgctgggacaattcttatggaataaaaaggaaattggacccctacctaccaccacatataaaaatcaatcccaagctgattaaagacatacagtgaacacaactgtaaaactttcagaaataacataaaatatatccatggcctcagggtagaaatgattttcttaaataagatacaaagcccacaaactataaaggaaaagatttctaaaatcaaccacatcaaaattaagaactgttggtgatcaaaagacattataaaaaagatcaaaagccaagccaagagaaaatattgcacaacatataatgatgaagaatcagtttccaggctatgtaaggatcacccacaaatcaatattttttttttaaaagtgacctaatcaaaaatggacagagcatgtagaggcacttcacaaaaaagcaagcttgaatagtcaataaatattttaaactatgttcactctaatttgcaatcgggggatgcaaactaaaatcacaatgagaaatcaccatgagaaaggctataacttaaaaacctgacaataccaagtgttggcaaggttgtgaagcatcttgaatgctcacccaccaccggcaggagtgtaaattagcacaagcactttggaaaattgtttggcagtgtttagtcaaggtgaaaatgtacaaatcttagtatccaacaatttcacacagagcgatgtgctccagagagacccctgcaagcgagcagcagaatccataaacaaccaacaaagctgcttatgccagtgcccaaaagagaacaaagtcacatgctcatcatcaatgaataaacaagatcatgaaggagctgcagtgaccacaatgaggatgaaatctcacaaaggtaactgcaaaccaatgaagcaaaatacaaaacaactcctctcacatgattttattcatataaaactcaaaaccacataatatctgactatattgcttcaggatgcgtacttaggtggtacaaccacacaagaaagcaagcgaatggttcccatacaatctccaatagtggttcctccaggagggaaggagtggctgtgattgaggatgagcatgagggagaatctgatggtggccctgtggctcttgacctgggtaaaatgggtgtacgcttcatggtttggtctttaaaatgttcatctatgttcctacactgctctctaggtttgttctgtctctctctctctctctctgtctgtctgtctctctctctctcacacacacacatacacacacacgtcagttaaagactaaaaaagaaagaagacacatacaccaaccaacagtttatgctgagaaagagaaaaggggaaaatacccagacagaaaattaaaagataacatagacacaggaaatgaaaagagatgacgagttggcaagacggcgagggtaaggaaatgagaactggagagacagaaaaaagaaaaaaataataagatggtcaaggataacaggagaaggggaagatacaagaagcaatattctctctcttctttctgtctctctttctctacctccatatctctccctctccttcatcccttccatctttgtctctctctcttttccctcaccattgccttccttgcacttcctccatccaggtccttctctccccttccatctctgtctctttctcaccttccacttttctttctctctcatctctctctctctctctgtgtctcctctttgtctcctctgtctcttccttcttccctacacacgcagcctctctttcttttaacacttatttatcaggtggctaccctgtgctggacacagtgctaaaaaagaggccctggctgggggaaatgggatggcatggcccaccgtggttcccaagcatcagtggcacggacgcctgcccagggcgcctcatcccagctccagcatggacctgtgggccgcctgccactctctccccatcattaatttcactatcaaacactcccagcatcacaagttgtaggtcttatttattaaatatttaactaggagaaacccagctgagatgaaacctctcatttgtggcagccacaggagagcagaacatggacctgctgctgggattaagccaggctgatgagtagaaccagggtgcccagagggggaaacaggtgggggcagcccccagtggggagaggaagacccagaaatgcagggagctgggctttcacacagtctcacctggatggcgagaggttgtcagccagggaaggcgagttcaaaaacccccaaaatcagaataggtcaatctatacagacagaagattagtagttgccaggggctgggggagcggggagagacagggagtgagcgctcagtgagtacggggtctcctttttggggtctttgaactacagagaggtgatggttgcacaacactgagtgtattaaatgccaccaaactgtacactttaaaatggttaatggtcaattttatgttatgggaattttatctcaatgttttaaaaattaaaaaaaaaaaaatcccacacccaaacccattaaccattagctctaaggctgctgacctcattttttaaaattcatgcttattacacaggcactgcttactatcaatccaaggcactcgctcagcattttgggtttctttcttttttagaaatagggtctcactcttgtcccccaggctggagtgcagtggcaccatcattgttcactgcagccttgaactcctgggctcaagggatccccccacctcggcctcccaagcagctaggactacaggcatgcaccactacacctgggtaatgtttaaatgttgcccaggctggtctcaaactcctggcttcaagcaatcctcccatttcagcgtcccaaagtgctaggattataggtgtgagccactgcatctgaccctactcagcactttgaatcatcccatcatttacttctcacagccctgggagggaggtgccagcaggtctctagttttagagagaagggagcttgtggttcagagagggtaagtggcttgcccaaggtcacacagctccaacttcagtctacctgcttagccacctaatgggctttctgctaactctggctgaactttagaaacccttggggagttttcaaacattccccactccaggggaagccctggacaaatctctccagcatctgtgggggtggagcttggggcatcagcattttcctttttcttttcttttttttttttttttttttttttttgagacagagtcccactctgtcacccaggctggagtgcagcagtgccatctcagcttactgcaacctccacctcccaggttcaagcagttctcctgcctcagcctcccaagtagctgggactacaggtgtgtgccaccacacctgggtaatttttgtaatttttagtagagatggagtttcaccatgttggccaggctggtctcaaacttctgacctcaggtgatccacccgccttggcctcttaaagtgctgggattacacacgtgagccaccgtgcccagcctcagcatttttaaagcttccaagtgattagaaggtgcagtcaagatcacctgaggaatctcactgaagagcagattgggattgagcaggtctggggtaggggatgagattctgcatttccaacaagctcccaggagatgctaattctgttggttcagggaccctggcaacatgtccagtaggatgctctagatctgcactattcagcacagtggtcactaagccacacagggtcatcgggcacttcaaatgtggccagtgaaactcagggactgtttttattgtaattaatttcttttcttttcttttttttttttttttttttttttttgagacggagtctctctctgttgcccaggctggagtgcagtggtgcaatctcagctcactgcagcctctgcctcctgggttcaagcaattctcctgcctcagtctcccgagtagctgggactgcgggtgtgcaccaccatgcccagctaatttttgtatttttagtagagatggggtttcaccatgttggccaggatgatctcgatctcctgacctcatgatctgcccgcctcggcctcccaaagtgttgggattacaggtgtgagccaccacatgtggcctgtaattaatttctaaaattgcaatagccatgtgtggctactgcctaccttatttggcagcataggtctcccgggctcaagagatcctcctacctcagcctcccaagtagctgggactacaggcatgtgccaacaccctcggccaatttttgtatttttttgtagagacggggtttcaccatgttgcccagcctgctctcaaactcctgggttcagcctctcaaagtgctgggattacaggcacaagccattgagcccagcctggtctgcatctgtaagtgatccaagactatggccaagggtgagacaaacaccttaggggagcaatgaagaaattaggaactcacttgggtcctccacctttcctttctcagcactggccacctgttcaggggccttcacctgtccccttgggtctccccaacgaatccctgcttcactccccagagagaaccatcagagcctccccacaccagcccctgacttctcctactcctcagatcaccctaaatcaagcccacatctccccttgggtttcctcctatctcagtttctcagttgtatctcctgtcacctccaaatgcagctaagatcacctgggagatctttatttttgagccttagtacttaccacactcaaactatcctttacctgtttatctggtccttggactccctctctctccccacccagaatatcagccacaccagggcggggatttttgtccgtgtgtttatttctctctgtgttttgtccatctacgtcccagtgcccatgccaaggaggaaattaagagcttgctggtcattagagaaaagtaaatgaccagcaatgactacctgctgagaatttactatgtgccacgcatgatgttttacagtcaccatccacttaatccttgcaacattcctgcaagaaaatgctacactgcttatcttatagatgacgaaacagagtggttaagattaggtagcttcccaaaagccacaccaccgatagaaacctagtcctagcccaggcgtggtagctcacgcctgtaatgccagcactttgggaggctgaggcaggaggatcacgaggtcaagaggtcgagaccagcttggccaacatggtgaaactccatctctactaaaaatgcaaaaattagctgggtgtggtggcgcgtgcctgtagtcccagccacttgggaggccaaggcaggaaaattgcttgaaccgggaggcagaggttgcagtgagctgagattgtgccattgcactccagcctgggcaacagagcgagactccatctcaaaaaacaaaagaaaagaaaggaaaagaaaagaaaagaaggaaggaaggaaggagaaagaaggaaagaaagagagagagagagaaagaaaggaaagaaagaaagaaagaaagaaagaaagaaagaaagaaagagaaaagaaagaaagaaaagaaggaagaagagaggaaggaaggaaaggaaagaaaggaaagagaaaggaaaaaggaaggaaggaaagaaaggaaggaagaagggagggagggaaggagggaaagagaaaggaaaggaaggaaaggaggaaggaaggaaaggagtaaggaaggaagaaggaagggagggagggagggaaagagaaaggaaaggaaggaaaggaagaaggaagggagggagagaaagacaaaggaaaggaagaaggaaggaagaaaggaaggaaggaaggaaaggaagaaacctagtcctagttgagctcagactctgtcccttaaccatcgtcccgcgacatctcttgcccactcgcacaccaacctctctggaatgcaaatggtttcccggagaaaacttgagtatttttccctctgggtttttatccttgctgtgccttcacctgtctcataaagtttctccatttgctagatgtgtgaccttggcaagcagtgttagctctctgagtctcagtgtgcacatctgcaaactgggggcaaaaataagtgccatgagctctgggggctgggatgaagttctcataaactgccagggcagttctataaagcttaggggctcataagctccccacagagaggagctactgttactgtaactattcaccacaaagcagagagtttccatgtcctcctgggacatggtgcttcctctttatcagggatggagtgaaatcctgacatgagcaagggcaggagccaagaaaagggcctttccgtcatgaatgtggaaaatggtctgtttgcttttcatcaggttttgggggttggggacatgggggatcctgtttggtcagttagaggagttgcagctggtcctaaagcttggagagcttgcactaaatcttgtggctgccatttcgctttgaaataaaggggctgtctaagggccaggtgtggtggtgcacaccgatagtcccaactactcaggaggctaagctgggaggattgcttgagcccaggcggttgaggctgcagtgagccatgattgcaccactgtgctccagcctaggggacagagtgagacctcacctctaaattttaaaaagggcttgtcagcaccaacagaggtacacagaggcgcacacacactattgcactggggagggaggaggccgatacctataacactaatacatcagactcttatttggcacccactgtgtgtcaggtactgttttgagtgctgctttcctcacaaccaccccacaatgcaggcactaatgttataccacttttactgatgaggaaaggcaggcccagggggctaagtgatttgcctaaaatgatatgaatggaaataagcagagttggtatttgaacctaggcagccaggctccacagcctccctccctccactacactggactgcctcaagccccacacagagccatgacatgcctcaatttcaacagaaacttgctcaatccctcaaagacatcggtaaagaatgtgcctgagaaaacagaggaaaggatatccaaacagcccacagagatctggaaaatgctctatgtcttaagtcaccaaagaaatgcacaggataccacaacaggatttcactttcacttatctgattggtgaagatgtaaaatcaagggagggcaagcctgattgggccacgtcgtcagggaaaggggaccttggaatttgaaagggcacagacttcctgtttcttgcaacctggcccaaaagcctgacatacaaccttgccataccatttccaggaatctgtcctagggaaacagtgacagaagtgtgcaaagacttctctaccaggatgctcactgcagtgtgatcagtgttggtggaaaaacggctggtctcaaaacaaatatacaaaaggaagcccatttttgttatgaaaatcaaaaagtttaggtatatcggggggaaaaaaggagtggttattccatttcctttggaaaaaaacaaaatcctcaccatagttcacaaagcccagaataagccaaccttgtcacctccctgccctcacgtcctcccattcacctagcatacagtaggtgctcagtcaacatttatgaatgaatgaacgcactccttcccattcccctccatctctaagctgatatgctccagggtctctctcctgtacgttcctaagggtgtggggatcaaggggatatagaaacacagtccataccagcagcattcaccatgccaggagaccaaagaaagtaaggcacgattttcaaacagggcaacagaaggggaaggagagagaaggggaggccgccgcagttttcattccaacattttccagctctgggtgagatttccttctatacactcatctatatttacatcaacgaatctgtcggtagcaagcctgttgcttcttgtgtgggatctaaagttcacagaaagctggcttagacacccagctaggaagacaaactgtaaattaaatttaagtcacccaaaaaccctaaatccacccactcctcttgaagaaacccatgacatcgattacatcaagatttctcaaccttggtattactgacatttggagctggataattctttactgagaaaggctgtcctgtgcattttaagatgctgaactgcatccctggtttctaccagccagatgccagtagcatcttgccccctccccctacattcgtgacaaccaaaaacgtctccagacattgccaaaagtccccttgggggaaaaattgctcccagttcaaaagcactgctttacatgcagcccaggaaaaattccaaaccatttaactgttctttctctgttccttgtcatcaacatcctgaatataccagtcacctgttctcaaaattccttctacagattcaaagaaagtggtaacagcagagtttcaattatgggcttggagtgccatatatagacaggaatttcattcagaaaactatcagaaccttggacagagattcacacacaaagatgtttactgcactgttatttataatggcaaaacaaacagccagagattgttacatgaatataatacacgtataaagtggaacattatcagatattaacaacagtcttttctggggttgccaccaacccatacagcaccactgtatgaatttaaacaagacacccctttctctggttgtgaaattaaacaagacacccatttctctgattgtgaacttaaacaaaacacccctttctctgtcaaaaattgtcataatagcttcatcttgctagaacaagatacttaagcttttatcagctggggtactgaaatagtagacatacaagctccatgatacttaagatatgtgacatgctatctttgtgcagtgcacaacctgtgcaactatacatggtggcccttattttttcaaggatacctagtggcatggaaatgtgttcctaaaagtttacatgcataaaaaggtatgggatgaaatacattaaaatgtcttcagagatttttttgtggatgagagagtatacatatattttatattcttttttgtacatgagatgttcagtaaatgaaaaggataggcctcttggaggaggtaacttttgggctgagacctaaatgaagagaaggagttagccatggggagacctggagaaacagtgatgcaggcagaggaaatagcttatgctgaacagaaggaatgtcatgtaatgcaaatgacatgggtgtgagtaaaatggtcagcagggctgagacagaatagacaatgaaaggaaggtagacaatgaaagagatgagatcaaagacaaaacagggaccagatcacatggggccttaaaggaccttgctacatcagtgtgttagtccgttttcacactgctataaaagtaatttataaagaaaagaggttcaattgactcacagttctgcatggctggggacgcctcaggaaacttacaaatcatggcagaaggcaaagggaaagcaaggcacgtcttacatggcagcaggagaggagagagaggaaagaggcccacacaagtttaaaaccatcagatctcatgagaactcactatcacaagaacagcatgggggaaatcacccccatgatccagtcaccttcaccaggtccctcccatgacatgtgggtattacaatttgagatgagatttgggtggggacacagagaaaaaccatatcaatcagtaatctgtaatctctgactagtgggtaagaatctggggcatttacccaatctgcttggaagagaaagagtctaccagtccaccaccacatgctatcctatccaccaatggagcaaaatccaaggaattccactttcagtcccagtgctgaaacaaaaccaggtgtttccagaattttaataatctttgttcaataacactgtttactttcctcaccattactcaattaaatacttatgcatgatatagtgcaggaactttggggggatgtgaggaaggcaaatcactgtcccctaccctcaaggagctttctaattacataggtaaaacctaagcatataatatttatttatttatttattttgagatggagtctcgttctgtcgcccaagctggagtgcagtggcatgatcttggctcactgcaagctccacctcccgggttcatgccattctcctgcctcagcctcccaggtagctgggactacaggtgcccgccaccacgcctggctaattttttgtatttttagtagagatggggcttcaccctgttagccaggatggtctctatctcctgaccttgtgatctgcctgcctcggcctcccaaagtcctaaacatacaatcttattgatttttacaaaagtgtgcaaaattcacttgatactggaaaaggtacaaataaggtggtaagcggagagacttggtcattcccaagtcaaacagaacaccaaatatcagggagacccacacatagacagctaccctaccatacacccttatatccaacatccacccatccacccacccattcaaccatctatcatccactcatccacccatccagtcatccatatttttacccctcaatccagtctagtcatctgcctatttattcatccagccatatattcactcatacaccaatccatccagtcatccatccagtcatccattcacccatccatttgtccacccacccatcgagtcatctaccaatctacttatccacccacctaccctccaatcacccatccttccttccttccttcatcccatccatccatccatccactcatccatgcatctgttcaaccatccatccatccatccatccatccatccatccatccatccatccacccagacatccaacactaactgcagaggatgcctccatcccctctaaaccacaaacatccagctatgatccataacttaaaagactgcgttgtgatcagaaacaggccacaagtcaaaaatttgcattctgacaactctttcaaagacaactcaagtctctaaacatttctgaccattccaatttgtgtaagacccaaacactccatgtccttgtaaggccctcagagaagctaacctatatttggtgctctgaagtatttgatgtcttcaaagacggtgcccttagggagaaggtaagactagagacagtatagttagaggaaggggaagctgtggggagattggagagtctggcaatggggcataacaaatgagagaaaaagattagaaacatggaagaaggattgctgagacgtggggaaaatcctacttgggcctaggaatcatggaattctagtatggacaatcaatgagaccttgtgattgtgttctccttggcttatatattggagcaacagtgattcagctgatcattcagaagaatgggttaacaacacagacgccaaaaataacagagatcaagggagttgagagacttggcaagaaagagcagaatattaacacttatgcagcacctactgtgtgccacacactattctcagcagtggatcagagaagcccaaatatggccacccacataagtccatccatctatccactcttccatgtataaacacatatagtgcttcctaagtgtcaggcaccactctaaacatcagatgtattaactcatttaatcctcccagataggagctattaggatccccatggagctattagaatcaccactgggacagactgggaaactgaagcacagaacacttaagtgacttgcccaagatcacgcagccagtgactagtagagctgggatttgaaccccagccacctagctccagaatccatgctctcaactcaaccatgctgcttctctacaaccatatcaattgccagtgtctaaaccacaggttctgactctcagaatacaagcaggaccaagagctaaccggttgacccagcctcttagagaaaatgatgagtaagctgtgaaatgtcttagctcctgccataaatgctgatgaatctcagctgattctaggtgaagctagatttccaagtacacagactaaaattaacacctcgaattcattcattcaaaattattgattccttacagcagcattgttcataacagcaaacaaacaaacaatcccccaccccaaactagaaacatcccaaatgcccatcgtcctgcttgaacccgggaggcggaggttgcagtgagccgagatcgcgccattgcactccagcctgggcaacaagaatgaaactccatctcaaaaaaaaaaaaaaaaaaaaaaaaaaaaaaaaaatatatatatatatatatatatatatatatatatatatatatatatatatatatatataaatttatgttgttaaagctgggtacggtggtgcatgcctatagtcccagcttctcgggaggctaaggcaggaggatcgcttgagcctaggaggtcgaggctatagtgagccatgatcatgccactgcactccagcctgggtgacagagtgagactctgactcaaaataaataaaataaaattcattgagttggctacttcacaggatgattatatatgccatgtgctttctgggtacagtatcttttaaccttcttacaattcctcggacataggactactgtccccgttttacagaggagaagactgaggctccacaactgtgagctggagctgagatttgcagccagggtggactgttcccaagctctatatgtctcccctccatccaatatcaccttccctcctcttttcctccttacagcctccactgcttgtgctgttaatcaaacagacacattcctatgcagacgccacaacatgccacgaacacatttcactgcagtgatggtcagcatagccctcccacccacacacaccatgcccatcattctcaataaagaagataataaagatcatggagataaaagaacgtgacagactctggaagatcagaatccatgtaacaccactgcgggccaagttttaagtctgccccagagtctcattgaagacaaatccatccacttttacaaaaaggtaacatccagacttcgccctcctgcaaatgctgttcgtatgaaaatactttaaaaatcagtttaaaattacatatattttttacacataggcctaaaatgagaacagaacttaacagcatgaatattatttactggcaagtgggtgactaagttgggtttccctcatggcttcagagaggggactcttgaatcctgttatttgggggctgggggtgggaggctgctaatttctaactgcaggtgccgcctgagcaacaggcacctttaaggaagactcacggctgctcccagtctgaacggcagataaagccgtgtctgaccgaagcgagatgtcaaaacttgatccggacttaactcaggcatttcccttcatagctggaatctctcttgtattagctgccttaaagacggcttctaaaagctgcattcattccaataaaaagtcttggcttttcagagggaataagtaactgactctccccctttcttggtcaacggcaccatctcttgcaccattcttctctctcaggtgttaagaactcaccattagggtgaccagcgtcccagtttgcccaggactgtgagtttccagagatgctaaacccaggatagtcccaggcaaccctggctgaagggtcaccctactcagataagaactgaggcccagtggtttttgaaacctaagttgctgtgcccactcatggttccctcgccaggaatgttccttgtttttcctatttttttagggagtgaggagaaagaagaccaaagtttggaaggggaggggggtacctaaattctaaaccaaaagttgagcaaagtttttctgtggagtttgcagtggacacctggggtggccatcctgggctgcactctcgaccggccccaaaggaagagacagggagtgcaaaaggggaagagggaagctaattatatactttaaaactccctcaccttgtcacccacagagagagggagggaccaaaggaggaaagagaattaatttttaccttagactcaagggaatagaaaaatgggtcaagtggccacgaattttttttcccctgaaagcttccagagagaacggagaatgcaaaatgtccaaaggtggctttaaagagcgccacgatcaggttaatcaatccacactgaccagtcgcagggggtggtgggggggggcacttcgctcccattcccacccagaaagcctcttttctggccggtttccaaaaaaagaacactggaacctaaatgactccatagtattacggctctggcgttttggggtttttctctgtgctggagactgtgctggccatttttcacgcacgaccccatttaatctcctgagagccctccaagggagatgctactagaaggaatatcctcatcatgcatgtcaagaaataggctctggtgcccaagataacatggctggtgaataatgtgaacctgggccagtctgacccagagtccggagtgttttccctctcctctctgccctctttcagagcaggcaccatcccatccggcccttttctcaggagctgagctggcattctcggaaatgcgttactgcacggctcttaggctctgatcatttctggatggagtccaccttcccggcggtgctttttattgctgagaaagtgtatatgtgtgcttgctactgggggggaaacagggagggggaagcataagccctacgcacccaacagatgcctcccactccaagtccctgaagaaagacttcattctcaaggggccgctgcatccaatctactcaagcactaacatttcagaaactttcattggtctgataatctcatggacagtctctcaaccccctgcaactaaaacccatcaaaatcctaaaacgttggcacaagggtagatcagatagatgttatacaatttagttaatgggtgaagacaggtaccttttctcatttgctcagcaaacgtttataggacgcctgctttgtcccacacactggggttgcagtggtgaagaacagggtaaagatcatgggtctcacagcctcagagcttgactttttcctggggaatggtagaactaccagggaggggtggaaccccacccaagagaaccccttctttctctctctctagtgcaggcacatagctttgaatgacatccttaatctttcttatttctctgaccgggatttaacactattacttccactcctttccatagatccacatccttaatcctaagccatcgaggccagacgtgctttggaattcagaactcagggcttttagacgcattgcaaagatgggaatgtaaaatggtacaaccacttaggaaaacagtttgagagcctcttataaaattaaacatacacctaccacacaactcagcaatctcactcctgggttaatttacccaagagaaatgaaatgtatgaaatgaaatgttcccactaaaacccataagccaatgtttatagcagctctattcataatcattgaaactggaagcatcccaatgtccttcggctgggaagcaaactctggtccatccatatcatggaatcctgctcaacaccaaaaaggaaggcgctactgtcacaggcaacagcatgaatgaatctcaaagtctgagtaaaagaatccacattcaaaaggctatatactgtgaaattacatttatatgaccttcggcaaaaggcaaagctgtagggatggagaacagatcagtggttgaaggggctggagaagtggggtgctgactcaagaggggcactgtgggggtattttagggttgatgaaactgtcccatatcttgatttgggtggtggccacaactacatccatttgtcaaagcttgcagaccagtatgtcaaaagggtgaattttgctacaaataaattatacatcaataaatctattttttttttgagacagagtctcaaaaaaaagtacagtggtgcaatctcggctcactgcaacctctgcctcccaggttcaaatgattctcctgccagcctcccgagtagctgggattatagacgcacaataccacgcctggctaatttttgtatttttagtagagacggggtttcaccatgttggccaggctggtctcgaactcctgacctcatgatccaccggcctcagcctcccaaagtgctgggattataggcgtgaaccaccagacccggcccctataaacctgatttttaaggaaaagaaaaatgataacaagatgtctctatgatctaacctggatactccaaccctagcccatgaacttaccacatggggaatccctagaagctagctagaaaagcagaatcccagaccccacccaaatcctgctggaccagaaccatcctgttaacaagacaacttccatacacctgaaagtttgacaggactacaatgcagacctaacagtcaggagctgaagcagcacctcatcatcaagcacatctaacatttctgctgcaaaacatactcaaatgcacaccaagtagaatgaatgaaaactgtaaattaagacttcaaactgaagtcagttcaggttaggttttacctctatatgagctcgtcttttggtttttggagctttttggattggggaattgtggataagaaattgcaccctttttgaaaatactcccattggaaaagccgtgctaaattttacttcgcagaattttgctcctctggaaataccagccaagccggtctagtacaaggatcacgtaagtgacaccatcctgccctctacggcagtaccttctagaacattctatctctcaggacaggccaagagtctgataacctgctcccatgtctcccagcgcttctcatgcagaaagtttctctttagagagcttttcttaaaaaaaaaaaaaaaaaaaaaaatgagaggagtgccaatcagccaatgtccacagatgtcaaagtgatgtcacctgatgtcaatgtgactttaggtgtcttgttaagatttctgcaaaccggatgaaaagctggaattctacgtgtaattcaggcaactgtgcgtgataatacactgacctgcttccagtgttcctccgatggcctgagtttctacatcatgttcagtgggagacctggtggcacagggagggctggaaagatgacattcaccttggcacttggtagaaggagtgagtggcattaagtggggagggaactctaggaaggctgacagatgctcctttttgagctgacagatctgagctcttcggcaatcatcagagaccctcatggccctatttgaatcacaattccagtcaatgaaaacatgaaaccaaggtgtgtggtcaagacggcttgctgcctggcatgagaaaaacacggcaatgtaaatttgaacatcaaagacttccatttgggtttcctcacttaggaagaggggaaaaaatgaaataaatgaggattcttaattgtcattgatggcttcaagtttgacccactgagggatgaaagaggaagaaatcatagtgacaaattgccccgagtgtggagaaagcaagactgcatccttcaccagtgtaccatgccagaatttacatttggaagtagcactcttaggccctgtgagcataccgacaagttcatggatcattcactcacttctcttaaacaagacagggaggaacctgctttccatatcgacctgcaacccttagtcaacaccatttccaaatacacatcccacaacacatgcatcaaaaagtagcaggggcgattccactcctatctaagagaactgtgggaaaaaaataatagaagacacaagaatgttcccagtggcacaaacagaaatgacacaaatgcccatcaacagtagaatggatagattgtagtagagtcacatacacagatgtgagcaaaagaagccagtggcaaaagaacgtactgtgtgactccatttacatgtttaaaagaggcaaaatgaaccttagaagtcaggtgagcggtacccttgttgggggagcaactaggaggcggtatggggagggggacttccagggcactgatcgggacctgggtgctggatacgtgggtgtgttcattttgtaaaaatctatgcatctgaatatatgtacttgcctgtacatatattagactttatttaagtacctacacactttttttttcactctcaggatatgctgaaacatttttttttaatggcagaaatatttagattaaaaagtagaatgttctgccctggtatcgtgactctgacattccacgtgtctttctctttacactggcctgaattcttttattcactacctccctccccaggtctctgtccatcccctctcatctccaaccctcccacccaccccgccaccgccctccgctccatccaggacagagaaagctcagtcctggatgacccagctcgatgacagattgtgaggtggggagttttcccttccagagtagggctgtataatgtgtttgttacctcgggtcaaagagaacaaaaacagtctgcagagagcataatgcacaaactcatcataagagcaagaaagccccgggcgagctggccagagaatagatgaagtggcaagcaacactcgcaattcacctgcctccctctcccacgattcccccttccgaggggccactgcaatccccctctcccccaacagccctccaatctgcaggattcaggctggacagaggtaagctaaggacacagcagaagggctccccacctccttcctttcctcttagaagtctccaaatccaggctccagaaggcgatctaaagccattttcaatgaggaaacctgtcagccgagcaaagccctctcactcctggagctaactgggtgtgcacccatgaataccctgtcctcctgcaaggcactcccactcctcactctgttgataggcagagtaatcaagccacccctgagcacttcaatgggcctgggatggtgaggaattgctaaccttaagaaccagcctctttaagagtctgaaacttaggaagcaaagacctggcacctgctttgggcaccaacggagatggcatcgtagttagaggtatgctcccctcaaaagcacctctgctgaacttcttaattttccccaccctcaaagtagaccactcacacactccaaaacctcagtgccctctgttgcaatcccagcacccaggatccaagcgccaggctcgattttgaacccccctgaagtgagtccctctaccacccgccatgctcctcaaacagcaacccccggagaccacacagggcccagccccgtttagtctataactgcaaaaccacatacaaaagggataggggactcatcgctgagccccagggacccatccagcccgttcatttttacacagagggcagctggttggaactgtgcggagaagcggcacatctgggcatggcacagtggccagccagcctgggcagcagggtgtgtcccccctcctggaatctgggtcatgcttagataactgctagaaagcccgactaattacccacccttgcctgcctacatctcgatagatgttaagccctcctcaaggtttatttcaagcaggcagggatttaaagaaacacagaagatctgcattttgatagcatctccacagaagaaaatgtgggcttcacctttttcctctggatctttgattaaaaaaaaaaaaatttaaaaggcatttacctacctaagatgtccacatgggtgctgattctcctggtgttccctctcggctactcggggtaggaaaagctggacatggtgctctaaaatggacccaccacctcatttgctgttgccctgtctttcttactgaaagtgtccagatcaggtcttcccaggccaggggcccagataaagcaagtgggatctctttctcgacacccccaaagatgatgaggttccccaatcagcggttaaaggcaatgggacctgcacacatgagggaaacataagcgccccccagcccatcactatcctctccagataggaacagcggcccaccctggggtactcacttcggccagtgctggcttctcagtgtgaaggccacatggactccctcttgctcttagccctgggagcccccaagcgccctgccctaaaagtgcggcggccccccaccttggggaaagcagtagtggagaggctgtccagcttcccctgcgtggactccagtgagcgacggccaagaaaacccaaccaaggcccccatagttcccctgccctggccagaagcgcccaggcccgagcccgctccaagctcactccgtagaactccaaaccctccggacttggctcgaaagcccccaccaaggctcctgcacgaccccaggccccagatctcattctagagtcggtccttgggaaggatccactctccgctgcccaccccccagccccccacaaacccattcccaagcctccagggtagctcaacccagctcggggtggagagattctttcacactcctcccggtgccccctctcccagcccctggaagacccccctcctccccacctcccatcaacccccgggtctctctcccagcctggaagaggggaggcggagggaggagggggaggcgcagctgctgctggggttcgggcaaaaggatatggccattcggtgatctttttggcgtattttctcaccacgttgtcttcgctgaagaggaagagagaccggttaaccgtgaggcagttctgtcggacggggatggggttgtagagtgccatggtccgcgctctctgcgccattgactgcttgtacatcctttgcgccccgggctgcccgccctgccggctgcccccggctcctcgcccgcctccgctgcccacgaccaccccggcggctgccccggagcctcctcccccgtagcgggccggcatctcgtctccgaagcgggccattctgcaaagagcaaagggctccgggttacgctgcggcgaacgatgcggaagacgccgccgccgccgccgccgccgctgatgctgaggctgccggggctgggagcgcggcggctggagctacgactgcggagacgctccacggcccagcccatcgggcggcggcggctcggcgcctcgggtcgggggctcagaaggcggctgcccgggccgagccggggatagcagctcgggacatcttcctggctgaccccggagaaggaggggcgggaggagggtgcgggggcggggcgcgggggcccggggaggaggggggaggggagagagaagcgaggcaaaaaataaccgaggaaggaatccaggcaatccccagtccacccactccggaaaaaaaaaaaaagagacagttaaaaaaaaaaaatccacccaacgcacaccccctttaagacgcgaacggtttgcaaaggacgccccccccgggacgcagtggaagcttcaaattcctccgaggtccgggtcaggctggcatcttgcaaaaggagtgcgctcggcccattaaaaaaaaataaaaaataaaaaataaaaaaatatatatatatttaaaaataaagaaagacgaaacccaggtctgggtggggagggcaaaaaaaaaaaaaaaaaaaattaagtgcccttctgttttgctggagttcctagaccttaaaaatgctgaaagatctgtagctccaaaaataaaataaaataaaaacaaagaagatgaaagggaagggaaagaggagggaaggggagtaagacgctccagagggttcctaaggagtcttcacaccgcagggtccaggtttaaaaaaaaaaaaaaaaattttttttcttcctgaatcaccaacggctgcctcttctgctcccggaggaagtgtgagtgtgtatgtgcgcacagcgtttcgctcaatggtgcctcatcttggggttaaattgcagcagtgaaatcctgaaaattcccaacagggggaaaagagagagagagagaggtatgcgccctccgcttagccactcaatagctgcccctggatgcggcaatgcctctccaccctccaaatccctccacctcctccttctctaggttttgctaaaataagactggtgtggagggttgcgggtagaagaaggtaaagaggaaaaaaaaatgggcgcaaaggtctgaaccactggccagcaaacggaaaaggggagcaattgatgagtttaacagtagaaggacccacccagagtgtcgacacatgagggcccgcgaccaatcgtggaggctcgtggaggcgcgggggtaccgggctcagcggagtttgtgggggagagaggggagcgtcgcatggttgggaggcagggaggggggaattggggtgcttcctcctcccctgggaggaaagcctgttttccaccccgttccatttcggttgcagacagccggacgctccccagcatcttgcaaggagaaggcaggatggaggcaggaaaaaaacttaaaagacagaaaagagaaggggatttgtgtctagaggtgcgattcgtcagtctctaaacaaatttgctctgtttagcaaaagaccatttttgaaagtggagagagtggtttggggttacttctgtgaacgtttcaaatcacaaggactcctgcaagttggaattaaaggtttattctaccttggagaccccagaggtgacaagtctgaactcccaggaggaaataattaaccaggtcctagttggctggataggggttctgggtggtatagtttgcttgatactcacgtctctccagaaccactttgattacttcccattctgctttttgtgtggtgaaattcaataagcacaaagaaaaatgcataaaacataaaggtacggagttaagaaattggtctgaaatgaacactcatgaaatcaagtctagggctagaaatggaacatcaccacctctgcagaaccccctttgccaacacgcttacacagccccttattccagcaataatcgctacctgactttatggtattcatatcttgcttttttaaaaaaagtttgactaccttattatgcgttcctaaccaatacaattttactttgcttcttttgggcttttatataaatggaataatcatatagtatatattctacagtttcttgtttcttcggttcaacattatgtctttaagattcatctggcagggcacggtgtctgcgcctgtaatcccagcactttgggaggcagagcatgaggattgcttgaggccaggggtttgagacaagcctgggcaatatagcaagaccctgtctctccaaaaaccttttttaaaataaaaattaaccaggcatggtgatgtgaacctagtcccagctacttaggaggctgagatgggaagatcccttgagtccaggatgttgcagtgagccaagatcaaaccactgccctccagcctgggcaacaaagtgagactctgtcaaacaaaacaaaacaaaacaaaaacaaacaaacaaaaaaaacaagattcatacatcctaatctgtttcgaattttagaaaaattcacctgtttgttgtcacacatggctgtgattcattcactttcactgctgtatagtatttcatcaagagaatatgccacaatttgtttatccatcatcttgttgatgggtatctgttttttttccagttggggctattaaacattactgcctcaggtacctttggtgcagataagaatgcatgtctctaggaatagccttaggtgtggaatgtctgggtccacaaggtattcatatcttcaagcttataagatgtcatcaaactgtcttgcaaattcaatgtaccaagaaaccattgaattttcatggagcttgtatacgcagaaaggccaaatggagaggaatgggaaaaggatgaaaaaggcaaatattctttcaagccttagctagttaaatcctagttaattcccttcccccctcgccaccccacacacacatatcaatattcgagttcttttggaacactctggaaagatgatatgtctttatataaagtccccgttctgtgccaatgcaccaactattatacattgccccatagcactttcaagattttctaacttgtcacgatatggatgaaatgattaaaccaagagtgattggaattgcaaggagatagaattgtgtgggattcagggagaaggaggggcttttaaggcgctcaccaaatatcagtgatttttgtacttgacattgtttcagatataaaaggtgaacagcaactaatatgaaacaagaagcgagcccatgtgttcagatgggaagaaccagtcatatgagaggagctgagttgaacttatcatttgttctgatggacctctctgagaagattattcagttttagagcaggagcattacctgcatagatctgtgaagaccccagagtttttcaggaaagagtgacatctcactgatggagctcctgccagggtaaatctcccactgagtcttcacagcagccccgtggaacagatgcaaacactgagggtgagggagacttaaaaactttcccaaggtcactaacgtggatctgaacccatttctgactcttgtattctgttggacagaggggaatttggtacaaccactttggaaaaccgttggctgggtgcagtggctcacatctgtaatcctagtattttggtgggcagaggcaggaggactgcttgagcccaggagttcaagagcagcctgggcaacatagtgagaccctgcctctacaaaaggaaggaaggaaggaagggagggagggagggagggagggaggggggagggaaagaaagagagaaagaaaagagaagaaagagagaaagaaaagaaagagaaagaaagaaaagaaaaaagaaaagaaaaggtcaggaaataaataaattagttgagcatggtggtgcatgcctatagtcccagctactggggaggccaaagtgggaggattgtgtgagcccaggagtttgaggctgcaatgagccaagatcatgcactccagtgtgggagacagtcaagtctcaaaaaacaaacaacgacaacaaacacataaaaagaaaaactttttggtcatttctattaacatggccatttgagtatcctatgacccaacaatgtcactcctgggtatacacccaggagaaatgaggatatatgccctagaatgtgcagcactattcatacttgctaaaagttggaaatttccaaaataccgtaatggataaatacactgtagaacatggaattttatgcagcaataagaaaggacaatatggagctacacacaggtgcatggatgaattttacaaactccatgctgaacccaagaagacagacacagaacagaacatggtgtataattcctgttatataaagtttaaaaaaaaatggtgcacacctgtagtcccaggtatcctgattcccagctactctggaggccaagacaggaggatggcttgagcccaggaattcgaggcttgcagtgagctacatgatctgtgctccagcccgggcgacagagtgagacccaatctcttcttttaaaaaattaaataagtaaataataacattaaaaaatgagcaacactgatcacctttagaagtcaaaggagtagtcgctttgagggtaaagggatacattctggaagcatctccatctgggtgacagtggcatgggtgtgctcactttttaagttttgttcattttgtaccttttcactgagctgcacgtgactgatttgtgcagttttgtgtgtgctgcctacttaaataaaaaatatttgtaggctgggcatggtggctcaagactataatcccagcactttgggaggccaaggtgggcagatcacctgaggccaggagttcgagaccagcctggccaacatggtaaaaccctgtctctacttaaaatgcaaaaattagccgggcatgctggtgcatgcctgtaatcccagctactcgggaggctgaggcaagagaatcacttgaatccaggaggcggaggttgcagtgagctgagatcatgccactgcactccaacctgggtgacagagtgagactctgtctcaaaaaaaaaaaaaaaaattcgtgatgctcctgaagtacagcccaagcagcaccacttgtcatgatgatttgtgattgttctctttgcacactttgaccatgaagcccctatacaacaaaatcagacatctttactggaggacaaagaacagtcctccaggatgccccaaaccgtgcctaggcagcagagaagctggctgtgtacagaactgccggcaaagtgttgtgaacattcagattcctgagccatcccacactctcttttatttattcagcatgtccctggggtatagccagttttggcaaccacagctctggaagggggcaaactcaccatctctttcttggcattctctagtgttatcaaaggaggtgctgttggcattttcggtgcaacacttgttgctcttcagggctgtcctgtgcattgcggattgtttagccttcttggcaaatgcccactaaatgtcagtagcatccctagtcatgtgataaccagacatacccacatacatttgcaaacacctcctctcacctgccatcaaggtgacagaagagtctacactttcctctcaccaaatggcatttccaaagtttgcctgactacgaagtttggtgtgctggggttctcctctccttcctaggaatcttctcaagtccttcaacccccaattgctcaatacctcttttccagaaagaacttaactcatttactataaagtgtggcagggctccatgtgcattatcttatagattcactttgcagacataacatttctgtagccaaaggaatgaatctctaacaccagaatcttacctatcacctagcaaatgggaatggatgggcaagaagtcattgcagcctcctcaaatgactgtagtaggtagttcctggacccccactaatacaaattactaatgttgaccaggtagaaagatttagaatgttattagcgttgcagacagaagcagtttaacagcaggcagccagaaaccagccccaaccattggttctaatctttaacacatctgccagctggaggtttaatttatcaatcagcagcagcattactatactggctttaagaatgttattcaattgaacggggctagcatctttgaaataaatgccccaaataaataactgcaaatcgcattcatttgactgctaaaacaattatcagcaaatctagtcatgttgagttgcaaaaatggatcggccaaaagacatttggtctctgccttctggtctggatacccatggggaatgagtatcaagatctttgggaggtggaggataaaaatgacaaagccaaatttgatcatccagacatctacgggtcatgatgtaggcacccaagagtgaattcagagacggaatgtggctgcgactttgggcattacattgcatagcagcatgtgctctgcaagcttccaaaaacgaatgaggcaaagcctaattctggacacagacctggtttcaaatcctagctctcgaaattcctagtagtgtgcatttggaaaggtgcttcccctctctcaacttcagcttcctcaataaaatgaagacaagactccttaccctacaggttgctataaggatgaattaagatcaagcagaggccaggtgtgatggctcatgaccataatcccagcactttgggaggctgaggtgggtgcatcacttgagcctaggagttcgagaccagcctgggcgacatggtgaaaccccatatctactaaaaatacaaaaattatcccggcatggtagcacacgcctgtagtcccagctactcagctactcaggaggctgaggtgggaggatcacctgaacctggaaggttgaggctgcagtgagctgtgatcatgtcactgcattctagcctaggtgatggggtgagaccctgtctcaaaaagaaaacagacaaacaaacaaacaaaaatcaagcagataagccctcagcataatgactagcatacatattatataagaattcatggtaagtagatttttaaaaaatcaccatagtcggccgggtgcggtggctcatgcctgtaatcccagctcttagggaggccgacgtgggcagatcacgaggtcaggagatcgagaccatcctggctaacacagtgaaaccctgtctctactaaaaatacaaaaaattagccgggcgaggtggtgggcgcctgtagtcccagctactcgggaggctgaggcaggagaatggcatgaacccgggagatggagcttgcagcgagccaagatcatgccactgcactccagcctgggcgacagagcgagactccgtctcaaaaaaaaaaaaaaattcaccatagtcaatcttccagacctgaaatttgtgaatatcactgactaagattgattaaatattaccttatttttaacttcttaaataaacattttattttggcataattttagatttacagaaagtttgaaaacgtagtacaagagagttatcattatgcccttcacccagcttcctctaatattgacttttttttttctttgagacaggctctcactctgttgtacaggctggagtgcagtggcacaatcacggctcactgcagcctcgacttcctgggttcaagcgatcctcccactgcagcctcctgagtagctgagtagctgagactacaggcatgtgctaccatgctccgataatttttgtatttttagtaggtatggggtatcaccatattgcccaggctggtctctaacttctgggctcaagcgatgcacccacctcggcctcccaaagtgccgggattatggtcatgaaccatcacacctggcctctgcttgatcttaattcatccctacagcaacctgtagggtaagaagccttgtcttcatccctagtagctgagaccacaggcacaaaacaccataccaaactaatttttttttctttttttttttctttttttgagacggagtcttgctgtctcccaggctggagtgcagtggcgcgatctcggctcactgcaggctccgccccccagggtttatgccattctcctgcctcagcctcccgcgtagctgggattacaggcgcccgccacctcgccgggctaatttttttttgtatttttagtagagacggggtttcaccgtgttagccaggatggtcttgatctcctgacctcgtgatcctcccgcctcggcctcccaaagtgctgggattacaggcgtgagccaccgcgcccagccccaaactaatttttaattttttgtagagacagggtctcactctgttgtccaggctggtctcaaactcctgggctcaagcaatcctcccaccttggcctcccaaagtgttgggattacaggtgggagccactgtgcccagcctcattttgtctccttagtctcctctgatctgtttcttcgtttctcacaaccttaataatgtctaggagtactgatcaagtactttgtagaacgtccctcaccttgggtttgtctgttttcatgattaaactggaataatggatttgagagaagaccattgcacagaggtgcagtgccgttctctttgcatcagatcagggtgtaagatagttacatgacttaccattagtgatgttaacctcgatcccttggttaaggtggtgtctgccaagtttctccaccatcaagctactgtttttcccaatacctactctaccttctgaacagtcactaaggcctacccacatgaagtggaggaagagggataaatatccccttctggactgggaagtatctatccgtattctttagaattctttcataaggaggccgggcacagtagctcatgcctataattccagaactttgggaggctgaagcaggcagatcacttgagctgaggagttcgagaccagcctgagcaacatagtaaaatcccatctctacaaaaaataacaaaaattagcggggcatggtggcactcgcctgtagtcccagctactctggagtctgagataggaggatttcttgagcccaggagttcaaggctgtagtgagctatgatcttgccactgtactccagcctcagtgacagaataagaccgtatttctgaagaaaaaaaaaaagttatatatgtaggcaatttggcaactaccataaaaacatacaagaactatcaggggataatgaaagtttgagggataacagatcatttacatagtgtcagagtatcttcccaaagacaactgttaattttaatggtcaaaacagtaacctgatagtggagcaccctggcagataagcaagtgacgggcaaatcacgtgcctcctagaatgacataccaagaaggctgcaacatcgcttctaggaacttctgccaaaaatgcatgatttgaataattggtaaacaaccatgttcagattaaggggcactttatacaataagtattctttggaagtgttaatgtcgtgaagcccagataaagacagaacaactggtccagagtaaaggaaatgtgactgaccaaattcaacaagtgagccaggacctccttttgctacaaaggacgctattggaacaattggtgacatctgaataagatctgtagattacataataacagtgttcatatgctaatttcctaattttgatcattgtgctgtgcttatgtaagagaatgccctgttttgggaaacacactgaattatatagggttaaagggccatgatatctacaaattactctcagtggtcaacggttggggtaaggagagaaagagagagagagaggataaagtaaagtgtaagtggtaaaatgttaacatttgagaaacctggataagtgatataggcgacttctttgtaccagtcttacaactttttggtaaatctgaaatttcaacaaaataaaaagttaaaataaatgagtggctacaaaaattgcagaggcacaaggttcattcattctcctgactgtatggaacatctgccatgtgcccagtaattttgccagcacagaacaaggcagacagaatttcccgttgtcgtggagttgaatggagatgaggaataaatagagtaaataataaggaaaatacatagtatgtcagatgaggctaagtgctaaggagagaaacaaagcaggaaagggaatagagggtgctgccattgggaattagagtcaaatgcgtctctgaaacaggttttgttatgcaaaatagcagccccctgcctccctccatgtttcatatccccctcctgaaagatactcactatcaacacttttcgctgatttttttttcttttttgagaaggagtcttgctctgtcacccaggctgcagcgcagtggcacaatcttggctcactgcaacctccgcctcccaggttcaagtgattctcctgcctcaggctcccaagtagctaggcttataggcacccaccaccacacccggctagttttttgtatttttggtggagacggggttttgccatgttggccaggctggtctcaaattcctgacctcaagtgatctgccttcctcagcctcccaaagtgctggggttacaggcatgagcccctgaacctggccaccttttggctgattttaaaaatcattatggatatataatagttgtgcctatctatggggtatatgtgacattttgatacaagcatacaacgtgtaatgatcaaattagggtgactgggatatccaccacctcaagcatttaccatttcttggctattattaaaaagtcaaaaaataacagatgctgatgagcttgtggagaaaaaggaatgcttatacactgttgttgggagtgtaaattagttcaaccattgtggaagacagtgtggtgattcctcaaagacctaaaaacaaaaataccattacactcagcaatcccattactgggtatatacccaaaggaatataaattgttctattacaaagacacatgcacgcgtattcattgcagcgctattcacgatagcaaagacatggaatcaacctaaatgcccatcaacggtagactgaataaagaaaacatggtacataaatatcctggaatactatgcaaccataaaagaacaagatcgtgtgttttgcagggacatgaatggagctggaggccatgatccttagcaaactaatgcgggaacagaaaaccaaataccgcatgttctcacttataagtcggagctaaatgatgagaacacatggacacatagaggggaacaacacacactggggcctaattggagggtttagtgtgggaggagggagaggattaaaaatataactaatgggtactaggcttaagacctagtacccagattacaggcgtaatctgttacacctgtaatcacagcactttgggaggccaagaagggcggatcacctgaggtcaggagttcgagaccagcctggccaacatggtgaaaccccatctctactaaaaacacaaaaactagctgggagtggtgacaggtgcctgaaatcccagctactcaggaggccaaggcaggagaatcgcttgaacccgggaggcggagtttgcagtgagccgacacggtgccactgcactccagcctgggcaacagagtgagactctgccgcgaaaactaataataataatctgtacaacaaactccaggacacaaggtaacctatataacaatcttacacatataccccctgaacttaaaagtattttttaagaaaggatttaccatttctttgtgatgggaacataaattattgttacctatagtcaccctattgtgctgccaggcactagattttattcctcctatctaactctatttttgtacccattaatcatttcctctttattccaccctccccactacccttcccagcttttggtaactatcactctactctctacctccatgacttcttttttttttttttttttttaagctcccacatatgaatgacagcatgcgatatttgtgtttctgtgcctggttccctttagctgattattttgctatttactaccatattatttatattgggtttttgtttgtttgtttcagagatggaggtctcactctgttacccaggctggggtgcagtggtgcaatgtcagctcactgcagcctcaaactcctgggctcaagtaatcctcccacctcatcttcctgagtagctaggactactgatgcacacctccacacctggctaattttattatttgtttttgtagaggtagtgtcttgttgtgttgcccaggctggtctcgaactcctagtctcaagcaatcctcctgcctcagcctcccaaagcactgggattacaagtatgagccaccacaccaagccccacatcgttcattcacttacttctttctacttttaaatttttcagttttagtcattatttatttgttccaacactattattttattcaactaatatttctcaaactgaccacatactatgcgtagcatactatgccagccactacagataatatagagaagcattaactatcaaagagcttatagttaggttgggaaaacaagtcgtacacttgtgaatatttaagtagtattaagaaatagccaacagcaatacccaaggatattataatgaaagcaacaaagaagtatcctgtctgggtgttgtagcactttataggtattagctatagaaaaggaggattttgctaatttctccctccatccccctacacatggaactttccaaaacctgcgcatttgcccaatattgttctttcacaaagtgaggaagattcggtgtttatattatcatgtacaaggcaagttacagttatgtcatgaacaaactatagctactttttctttacaacatattgtttcccttgggacttatcattttttaatcttctttgtttggtacttattgcaaatttgaccccccaagtctcttaacaggtattcagttcattttatcatccagaagcagtctttcctgaagacttgtcacatggtctaatcaggactttccctggcatacagctttcatcctgggctctctctttatcatcatccaggagattccctttgcttctcattgttggatttcttaagtccagtgttctctgtttccctcttcttggtttactcccttgtttgggtgaagcacatcctctggtagcttcctaagaaaggatgcatgagaggttttccagttacctattgctgcataaaaaccagcccaaacttagtagcataaaacagcaacattcatttttattatcacattttgtgatttgggtggtcaactgggatcatctgagtggttttcacttggggtctttcatgcaaatacagtcagatggcgagagggactagggtcatctcaaaggcttcctcagtcacagggctggaacttaggctggaaagactcaaacaactgaggtttctcaagcatctatctccatttctatgtggtatctccacatggcatctccagtatggcaacttcaggatagctgaacttctcttatgccagttcaggactccaaaggcacatgtctcaagggagagagccaggcagaagctgcatctccttttatgagctaaccttggaagtcacaaagcatcactccttccctactctattagttgaatcagtcacaaaggttcacccaggttcaaagggagagaatatagattccaatcctttatggggaagtgataaaattctaagcaagtgtaaaatgggagccattgtgcagccatttttgaacagtctaatctgtctcaggaagtaaatattggagacttctatgtatgaaatgctattgttttagctttatacctcattggtagtttggctgggtatagaattctggtttggagatcattttacttcaaaaatgtgaagtattgctccaacgtattctcaattccagtattgctgttgggaagtttgaagcattcttactcctgatttcttgtatatgacctcattttttttctctagtagcttttagaatctttttccattgtgttctaaaattttattatgatgtaagttagtttaggtctattttcagtcattgtactgggcacttagtatgatgattgttaccccctttttttagagacaaggtcttactttgtcacataggctggagtgcagtggtgtgatcatagcttattacagcctcgaactcttgggctcaaaacagtcctcctaccgcaggctcctgaggactataggagtgtgccaccacacccagctaagattctcacccttttttcatgattctcttttaaacttattatttagatgttggactttctggactgattctcttatctgttcctttccttctattttgtatttccattgtgtcttaatcttctttttgagagatttctctaattttatctttccaccttttgttcagttttttatttatgcttttatattttttaatttcaagaggcttttggtattgctataattgttctctgagtgttccttttccatagtattctgccaacagccacaagtttaagcttgaaatcacatcttcccccagtcaagccttaagatgagaacgaagccccagttgataccttgattgcagcctcaagagagaccctgaaactgctgcaccctggttcctgactcacataaactgtgaaataaatgttgcttaaagctgccaaggctttggtaaattgttacacagcaatagataatacattaagtctccatatttcttatcttctcttcctgaaataaaatagccaatttttctcctttctggatctcaaaaagatttattctctgagacaggcattagagctgttcaccaaatatttccagttctccatatacaggcatgtgtaagatgtaagctggcatttcctggcccccttgtggtctgctggggtcatgtgactaattctgaccaatgagttctcagtggaaatgaaacatgtcactcccaggttgaagcatttaataaccaatacaaatctctctaatgttgcagtgtccaaggcagtagccacatgtggctatcaaaattaaacaacatttaaaatcctgttgttcagtggtacaagccatatttctagtcctcaaaagctacatgtatctagtagctactttattaaacattggagatagggaacatttttggaaagttctattgaacttttgaaagtggtccacggcagtgctctacaccacttttttcttctgcataggaactggcaaagctccaggtggcaaacgctccttaagactagctccagagtgaggacaacatgcaacataagtgactctttagctttttcttttattgtggaaaaatatgcatcatagccgggtacagtggctcatgcctgtaatcccaggactttgggaggccaaggtgggtagatcacctgaaatcaggagttcgagaccagcctggccaacatggtgaaatcccgtttctactaaaaatacaaaaacttagctgggagtggtggcgggcacctgtaagcccagctactggggaggctgaggcagaagaatcacttgaaccagggaggtggaggttgcagtgagccgaggttgctccattgcactccagcctgggcaatcaaagcgaaactctgtctcaaaaaatatatatgcataataaaaacttgatcattttaaccatttttaaggtgtacgtttcagtggcattaagtacattcacatagatgtgtaaccgtcaccatgattcgtgtccagaattttttcatcttcccaaactgaaactctgtccccattaaacactaacttcccattccctctcccccagcccctggcaaccactcttctactttctgtccctatgaatttaaccactctagggaccccatataaacagaatcatacagtatttgtcttcctgtgactggctgatttcacttagcattatgtcctcaaggttcattcatgtcgtagcatgtgtcataatttcattccttttttaaggctgaataatattccttcatatggatatacaacacaatgcttatccattcacctgttgacacacacttgtgttgcttccaccttttggttattgtgaataccgctgctatgaaatggatgtacaaaggaacatctgtttgagcccctgctttcatttctttgaggtttacacccagaagtaaaattgctggattatacattaactttatatttgagtttttgaggaatcaccataccattttctgcagcggctgcagagtccttagctttgagaagtacatattaaaatatttgcagatgaaatcatacgatgtctgagatttcctttaacagggttaaacacaacccagggttatgttagagcaaattaaaggtttgcttcaatttgcaaattaaggttatgtttaagtttgggctagagaaatacaagatgtgttatgagttgataattattgaagatgggttataggaattgggtgggatatcattctattttctcttctttcatatgtgtttgaacttttccaaaagaaaataaatttacttttcatataaagtgcttgaagtattcttaattcacattgagacaagggcctcacacttaattatggaaacaaaagtactcaagcttactatattcttaggcaattacaaattatattcagcatctaacccctctggtaagtcaggagcttgattaaatgcttagttatatattcatgtgtatcctaagaagttagcaagggaaatttaatcaaatgagctacacctgcttatggaaatgcagatcttagtttttcttttttcttttttttttttgagacagagtctcactctgtcgcccaggcaggagtgcaacggcacggtctcggctcactgcaacctccacctcctgggttcaagcaattctcctgcctcagcctcctgaatagctgggattacaggcgcccaccaccacgcccggctagtttctgtgtttttagtagaaacagggtttcaccatgttgctcaggctggtcttgaactcctgaccttgtgatcctcccgcctcagcctcccaaagtactgggattacaggcatgagccaccgcgcccggctggtttttcttgagtaagaaccgagcaaggtgtccccaggttgcaaaataacaagttttaccacacctggagataaagttaccaacgataggatcaagtgcactatttcacctagaaagcttgagaaaaattatcagcttcatctgttcattcattcatttgacatatgttgattatgcatttattctataccagatcctatcccaggcacatccattaatagagcaaataatttcctgttcttaggaaactcactgtttagggcagagaaatcagacaaataaactcaggcagatttatcatctgtcaggtaaagatagtttttataagaaaaatggaggccaggtgtggtggttaacgcctgtaatcccagcactttgggaggccacggctggtggatcacttgaggccaggagttagaaatcagcctggccaacatggagaaactctgtctccactaaaaatacaaaaattagctggggatggtggtgcatgcctgtaatcccagctacttgggtggctgaggcatgagaattgcttgaacccaggaggcggaggttgtagtgagccaagatcacaccattgcactccagcctgggtgacagagcaagaccctgttgaaagaagaaaggaaggaaggaaggagagagagggaaggaaggaaggaaggaaggagagagggggaaggaaggaaggaaagggagagaaggaaggaataaaggaaggaaggagagagagggaaggaaggaaggaaagggagagagagaaggaaggaagaaaggaagggagggagggagggaagagagaaagaaagaagaaagaaagaaaaagaaaaaagaaaaagaaagaaagagaaaagaaaagagagaaagaaagaaagaaaaaaagaaaaagaaagaaagaaagaagcaggtaagggtcagagtgggagctattttgcaaaagactgctctaagaaggtgatatttgagcagagacatgaaggcaggaaaagacgtgctgctatctgaaggaagagcatcgcaggcacagggaacagcataggcagaggcctagatggaagatgcctggcatgcttgaagaacattaaggaggcttgtgtggctggagtggagagaataggacatgagggcagggaggtgatggggattatggggctggcattccatgttgggcctttattgttttaaaatgtaggttttattattattgttatctttttgagacaggtttttgctctattgcccaggctggatgccatggcatgatcatgggggagattcactgcagcctcaaccccctgggctcaagcaaacctcacacctcagcctcctgaattgctgggactacaggcgtgtgccaccatgcctggctaatttttccgggtttcttttgtagaaatagggatcttgttatgttgccagggctggtcttgaactcctggtctcaagcaatcttcccacttcagcttcccaaattgctgggattacaggcatgagccgctgcacccagcccagttttattattattcaggtatggcaaggccactagatcaggggatgactgccattgaaaagacagtttgttactcacaggtccaagaagaaggggcacgcccatgctatgcagggccacacagggaagcaccagggctgggccagggaccgagggaataaagaaaacatgtgggcaagagcctttattgtggtttccatgggaaggaatgagccaggcagggtgagggcttcggggcatgggagttgcccctcgttgtttggtacctggctctgagatcattagagcaggggaatagtgtcccagcatgtgagagcccaagaaaggagatggttgggggtgtagatctggattggttggtttgcatgtaaaaggctctttactatctagaaattgtctagctctgggagggggcatccttgtagggtcagcaaagccccacatatcagagaatcagaaatacatggttaagaccgggtacagtggctcatgcctgtaattccagcactttgggaggtggaggggggtgggtggatcactcaaggtcaggagttcgagaccagcctggccaacatggtgaaactctgtctgtacaaaaaatacaaaaattagcctggtgtgatggcgggtgcctgtggtcccagctacttgggaggctgaggcaggagaatctcttgaacctgggaggcagagcttgcagtgagctgagatcatgccactgcactccagcctgggtgagagtgagactacatctcaaaaaacaaacaaacgagcaaaaagacatggttaatacgttgattttatgaaacttgcctcaaagatgtttcctcttgtaaaggcacattggggctcttaaaatgtttcgagttataggacctcaaagctcctgtctgtcttgttcactgcctcagcctcagccatgaagagaggtcaaaatagaaacccaacacctccagaagtgaaaagggcaagttgcagagaagtgcaggtgttgagctatctttatgaaagaaagagacagaaatacatgaaaaaaagaaaaaccattttgctcatattctcaagaagaaacaaaagattagccagaaaccaatacaaattattttccaatggggagagagagagaatgaagctggggacacaggtagggggcatttgattctgatgcctccttagaaggagaatagcatgatttccccagaaaatggagacttggtccttttattttcttctgttttgcccaacgactaaaaaagagcttgtatgtatccggggaagacaacagagaatgtggtaagagagttaggcttggtgacaacaagaatgggagcacacgcacatgtttgcaaggttacacataaatatatgcatacatctgtgatctccttccatagctgttctgccttttccgtcactgaaataacaactaaatcatctcatgtcccatatggcagccagactgtcacaaagttaatggacataaagttcacaagggcttgtggtacaaaaagtaaactttttgaattataaggaagtaggtactacactggtgcagcaaacactgtccagccatgccctgaccacttgagtgcatgcaggtctgacttccccctgccagcccccagggcattttctctggctatcaaagtgtccactcagcagtctgtggtgttagagaattaatactcccatcctttaacttatgatggatgggagttgatggatcaataccccagctccctcaccactagcatgcaacaacgctgaggaatgtgctctctgctgcctcccagaggtccccactggtaattgagacccagttgctcatggtggtaacttgcctgatgactcacttatcactgggtcttccctttcctacttttctgccagtgtgttttgggatctcctccagaagcattcaaatctctgcttctggatctgcttcttgggagttggggggcgggattcaaactaagacaatggagttggacagattctgttagctacttcaaaatatttaggcagaaggaaggaacttcagggcattcagggcagttttcctggatcctccactgaacttccttcctttcattttccttccttccttccttccttccatttcttcctcttgtttcttcctctcattctcctttctttctctctctttccttccttccttccagctcaagacatggggctgcttctgctggggcaatacttaatggtgttacatacaaaggttttttttccatattgggggaaatatttttaggaaggacttccttttttccttccttccttcctcccttccttccttccttcctttctccttccttccttcatcaaaaaagagtatgaaaggtgtcttagtccattagtgttgctataaaggaatacctgaggctgggcaatttataaagaaaagaggtttgtttggtcaacagtcctgcaggctgtacaagaaagttggtacaggcatctgcctctggtgagggcctcaggctgcttccatcatggtagaaggtgaaagggagctggcatgtacagagaccacatgatgacagaggaagcaagagagagcagagagaagtgccagagtcttttgaacaaccagctcttgggggaattaatagagcaagaacttactcattactgagaggaaaataccaagcccttcatgagtgatctgcccccataacccaaacacctcccactagaccccatctccaacattgagaattaaatttcaacatgagatttggaggggtcaaatatccagaccaaaagcaaagggttttgtatgacaaaacaagcatatatcaggtacccccgatatgtttactacctgagccttattgtgtcaccaaaaaataccagaaatactcgtcaaagatttagacccacacacactatccaaaacctagccataagccacatgtggccactgagtgcttgaaatgtgactcatctgaattgagatcagtaaagcataaaatacacaccagatattgaagatttttgtttctgtttgtttgtttgttgagacaggttctcactctgtcgcccaggctggagtgcagtggcgtgatcatggcacactgcagccttgacctcctggatttaggagatcctcctgcctcagcctccctcgtagctgggactacaggtgcataccactatgcccagctaactttttgtagagatggggttttgtcatgttgtccaggctggtctggaactcctgaactcaagcaatctgcctgtcttggcctcccaaagtgctaggattacagacatgagccactgtgcccaacctgaagacttaatgtttttaaaagtctgaaatatctcaatagtttatatgttcatctcatgtggaagtaacattttcaatatattgggttaaaaatatattattaaaactagcttcacctgtttcttattaccatttctaacgaggctacctgaaaatttaacattacatatgtgatccttgtatttcttttgttttcttttctttcttgtttttttttttttagagacagggtctcactttgttgcccaggctggaacacaacggcacaatcatagctcactgcagctttgaattcctggcctcaagaaatcctcccacctcagcctcccaaagacttgggattacagggatgaaccacagcaccctgaccccttgttgtatttctgttggacagtgcttatcggatgactaccaagccctgcacttctttttgtttgtttgtttgagatggagtcttgctctgtcacccaggctggagtgcggcagtatgctctcggctcattgcaaccactgcctcccaggttcaagcaattctcctgcctcagcctcccgagtagctggggttacaggcacctgccaccacacctggctaagttttgtatttttagtagagttggtgtttcaccatgttggccaggctggtcttgaactcctggcctcaagtgatccaccccctaccttggcctaccaaagtgctgggattacagacatgagccaccgtgcttggcttcttttttcttttttctttagagacagggtttcactgttgctcaggctggaacacagtggcacgatcatagctcactgcagccttgaattcctggcctcaagcaatcctcccgtctcagcctcccaaagagctgggattataggcatgagccacagcaccctgatcccttgttgtatttctgttggagagtgcttgcctggatggctaccccagccctgcacttctgagctccatgaccccttagaaatggtttcctcatctagaaacaatgcaacagcaacaaagaataataataccatgctaacatccatgctgggttctacttatgtgagtttgaactatcatttcacctctttgagcctcagtttcctcacctgcaaaatgaggatgaggacaggacacaccccatgggatcacgaaaggatggaacaatgccctccctctatatgtgacaggccaagcacagggtagtggaaaataaacactgacttcattggcaatcctctttactgagtgcagttgaaattgcctcttacaatgcaaatcaaaaccacagtgagataccatctcacgccagccagaatggcaattattaaaaaatcaggaaacaatagatgctggcgaggctgtggagaaatagtaacgcttttacaccgttgatgggagtgtaaattagctcaaccattgtggaagactgtgacgattcctcaaggatctagaaccagaactatcatttgccgcagcaatcccattactggctatatacccaaaggattataaatcattttactataaagacacatgcacacatatgttttttgcagcactatttacaatagcaaagacttggaaccaacccaaatgcccatcaatgatagactagataaataaaatgtggcacatacacaccatggaatactatacagccataaaaaagaatgagatcatgtcctttgcagggccatggatgaaactggaagccatcattctcagcaaactaacacaggaatagaaaacgaaacatcacatgttctcactcataaatgggagctgaataatgagaacacatggacacagggaaggcaacatcacacactggggcctgtcaggcagtggtggggaaggggagggagagcattaggacaaatacctagcgcatgcggggcttaaaacctagatgatgggttgatgggtgcagcaaaccaccatggcacaagtacacctatgtaacaaaccggcacattctgcacatgtatcctggaacttacggtaaaataaaaaataataataatacaattaaaagttaaaaaaaaaaaaagaaattgcttctcgtgtccaggaaagcacctggtgctccagaaacagagaaggcaaaaacagaaaaagacccactggaggccaggcgcggtggctcacgcctgtaatcccaacactttgggaggccaaggcgggtggatcatgaggtcaggagtttgagaccagcctggccaacatagtgaaaccccatctatactaaaaatacaaaaattacagctaggtgtagtggcacgcacctgtagtcccagctactcaagagactgaggcaggagaatcatttgaacccaggaggtgaaggttgcgatgagccgagatcttgccattgcactccagcctggatgacagagtgtgactccgtctcaaaaaaaaaaaaaaaaaaaaaaagacccactggagacacaatcaaataaaggtaatagaaaaagagaccccagcatcacttattggtgggagtaaaaatttcacctaagaattacatgtggagaaaaacatgaacgcatttgtgttcagactgttcaaatgcatgttgtcccacagagagcttaataggttgacttggcagaccattaaatctcgcttctgtgtctcttgccttcccttccttggcgtcgtctgtgtcttttgttgtggaaaaagctttcatcccatgccgacagaaatcactcaactctcacctgaggcactcatttaagagcatgcctcagaggattgtgtgttccttggacacgtgtcaaaatatcacatgccttccataaatatgtacaattattatgtatccatagaaaaaaggaaattaagaggaacaaatatagagattaatactatttgcatattaaatgatgatctaattataaaacataggaagttaaataaaaatattagaaacaatgagataattccataaggtggctagttataaaattaatataaaaattggatcgggcacagtggctcatccttgtaatcccagcgctttgggaggccaaggtgggagaattgcttgagaccaggagttcaagaccagcctagtcaacatagcagagatcctgtttctaaaaaaaaaaaaaattatattacaagggcatagtggtgcacacctgtagtccagctacgcaggaggctgaggcaggaggatgaggctgcagtgagctacgatgatgacactgcattccagcctggccaacagggcaagaccttgtctcaaaaaaaaaaccaaaaaattattataaaaattaatgctgcccgggcacggtggctcatgcctgtaatcccagcactttgggaggccaaggcgggcggatcacctgaggtcaggcattcgagacaggcctgaccaatatggcaaaaccccgtctctactaaaaatacaaaaattagctgggcatggtggtgcatgcctgtaatcccagctacttgggatggtgaggcaggagaacagcttgaacccaagaggtggaggttgcagtgagccgagatcgcaccattgcactccagcctgggtgacagagtgagactctgtctcaaaaataataataataataataactatatatgatgaccacttactgaataaaatggggaaaaaagtctcatttacaaaagcaaaccaagataaagtactgtattgaaaataaacttggccgggcacagtggctcacacctgtagtcccagcactttgggaggccgaggtgggcagatcacctgaggtcaggagttcaggaccagcctggccaacatggtgaaaccccatctctactaaaaatgcaaaaaaaattagccagttgtggttgtgcgtgcctgtaatcctagctactctggaggcagaggctggagaattgcttgaacccaggagatggaggttgcagtgagtcgagattgcgccactggactccagcctgggccacagggcaagactccatctcaaaaataataaaataataataatgctaactatatatgatgaccactcagtgaataaaacggggggaaatctcatttacaaaagcaaaccaggataaagtactgtattgaaaataaacttatggagtgggaagaacccttatgaaaagaattttaaaattctactgaagaatgtggtataatcctccaatacacgaaaataaatgcagttattgagaggaaaacaatactgcataaaaataaattctgtccaagttactctacgagtaaaagtgttatttgttcccaaatcaagaaaaaaccaagtcaccttgggggaccagaatcaggggaaagagatttaactgggcttaaagatgtgttacaaggcggcacggcatatgttggagttgtatgaccttgggcaagctgctcaacctctctggcctcagcgtgctccttagtaaaacagggaaagtgcagtgttcttgtgattggtgattgtgtggattaaagtcatgttagataggctcacagcctgggtggcggtgttggtaattttcactgcctccaacttacagtcacgtattatcaccaaagtgactcccctcctcccacatgagtctgagagggctcctggtatatcaaaaccatgtgaaaagcaatcgtgtcctttggacattttagtgcattagctcccactgaatgtaacaattgtggccagtgtggtggctctcatctgtaaactcagagatctgagaggccaaggcaggaggattgcttgtgcctaggagttcaaaaccagcctgggcaacatagcaagaccccacccaaaaaaatagccaggcatggtggcacatgcctgtggcctcatactttggaggctaaggtgggaggattgcttgagcccaggaggttgaggttgcagtgagttatgatcgtaccactgtacttcagcctgggtgacagagcaagactccatctcaaacaaacaaacaaacaaacagtgagtctgaaagttttctttaaatttccttgtttttatttttttaagagatagggtctcactttgtcacccaggctggagtgcagtggtacgatcatagctcactgcagccttgaattcctgggttcaagcctcagcttcccaaagcactaggactaaagtgtgaaccactgcatccagccataaatcaaatttctttcatttgttttaaaaatttttgcaaaagtaaagtaatttttattttaaaatattttaggctgggcaccgtggctcatgcccataatcccagcactttgggaggctgaggtgggcagatcacctgagtcaggaattcgagactagcctggccaacatagtaaaaccccgtctctactaaaaatacaaaaattagcaggcgtggtggcgcacacctataatcccagctactcgggagactgaggcatgagaatcacttgaactcaagaggtggaggttgcagtgagccgagatcgcgccactccagcctgggcgacagagtgagacagtctcaaaaaaagaaaaagcacaatattttaaagccactctcccatgacttctccaatacaaatactgggtattttattgtatttctgtctggttctccccctctaggtttttatttttcatacacatgtaattataatttaaagattttatatacaatagttttccatcatctgagtagtcactatacggctcattatccaagtatttacaccattatgtgtttagggaagcaaaagtcatcctaacataaaaattgtcactaatgaactgacaacttgacaattatccccctcaaccatccatttcggagtaatacaaatattgctttggaagccatcagatcagtgtgtttgtcactgtttatctctgattgttgatggttgcttgaaactcaatgacacaattcaaaactatgtgaaacaactgcagagtgaacattgaaaatctttgcaaggggcagcaggatttcatgaagtcaatgaaagtgatgttggagagctacttgcaatgcagagaataacattgttaagtgaggaacttgcagtgagactggttaacaacagaaaaggagatgacaggtggatgatagtgatgaacactttgaaataaaatgaatgggctgggagcggtggcttatgcctgtaatcctagcactttgggaggctgaggcgggcagatcacctgaggtcagaagttcaagaccagcctggccaacatggcgaaaccccgtctctactaacaatgcaagaaaagtagccaggcatggtggcaggtgcctgtaatcccagctactcgggaggctgaggcaggagaatcgctggaacctgggaggcagaggttgcagtgagctgagatcacgctactgcactccagcctgggcgggggagcgagactctgtctcaaataaataaataaataaataaatggaatgaatggatgatcaaatggtttaaaaagccctctgaggcaccttgttttggcccacaaaatgattcccaacaaagttcaagattacataactgcctttaggtttttgaggaatcaccacactgtcttccacaatagttgaactaatttacattcccaccaaaagtgtaaaagcattcctttttctcccattaccgggtacatgcccaaaggaatataaattattctattgtaaagacacatgcatgtgtatgtttattgcagcaatattcacaattgcaaagacatggaaccaacctaaatgcccatcaatgacagactggataaagaaaatgtggtacatatataccatggaatactatgcaaccatagaaaggaacaagatcatgtcctttgcagggatgtggatggagctggaagccattatcctcagcaaactaacacaggaacagaaaaccaaataccgcatgttctcacttaaaagcgggagctgaatgatgagaacacatggacacatagaggggaacaacacacactggggcctttttgaaggtggggggtgggagggagagcatcaggaagaagagctaatggatgctgggcttaatatctaggtgatggtatgatctgtgcagcaaaccaccatggcacatgtttacctatgtaacaaacctgcacatgtaccctggaacttaaaagttggggaaaaaaattacaccactgaagtcaaagatgaaatgaaaggggttctgttgttctaccatataattttgttgggaaataaggcacgcttgaatacagtcatccctaagtatccatgagggattggttctaggaacccccaacggataacaaaatctacagatgctcaagtccctgatagaagatggcaccgtgtttgcatatagcctgtgcacatcctccagcacactttaattaattaattattcatttattttttgagacagggtctcactctgtcgcccaggctggagtgcagtggcaccatctcggctcactgcagcctcgacctcccaggctcaagtgatcctcccacctcagcctccccagtagctgggactaaaggtgtacactaccatgctcagctaattaaaaaaaaatatatatatacacatatatatattttgtagaaatatatatatacacatatatatattttgtagaaatatatatatacacatatatatattttgtagaaatatatatatacacatatatatattttgtagaaatatatatatacacatatatatattttgtagaaatatatatatacacatatatatattttgtagaaatatatatatacacatatatatattttgtagaaatatatatatacacatatatatattttgtagaaatatatatatacacatatatatattttgtagaaatatatatatacacatatatatattttgtagaaatatatatatacacatatatatattttgtagaaatatatatatacacatatatatattttgtagaaatatatatatacacatatatatattttgtagaaatatatatatacacatatatattttgtagaaatatatatatacacatatatttatatattttttgtagagataatcttactatgttgcccaggcaagtcttaaactcctggcctcaagcaatcctcctgtctcagcctcccaaagtgctaggattaaaggcatgagccactgcgcctagcccagtatgctttaagtcatctctagattaattataatacccaagatcatgtaaatgctatgtaaacagttgttgtattgcttagggaataatgacaagaaaaaagtctgtacatgttcagtacaggcacaaccatcgcaggcctaattacattttacatctgcaacttgttgaacccatggttggttgaacctgtggattcagtgtatagggctgactgtatcaacttttgattctttgttaattctaagaagctgatcatgtttggaattactatttaaactttgttgaacacaatttaaaaaattaactgaggcttagaaagtgtggcttcattttacaggacaaagtcccaattgcctctctctcctcacccccacacccggtgctccctgtgaaatttggattcctgtattcagtggattcagtttaagcagctttttccagtacttagtactctgaaatgaataggtttcctctagcactttcttacttaaaatcatattataaccaccattatctttgatggctacattcatttaatttatttacttattccttttttaatgaacttttaataatgtttctgatgagatgcttttaaaagcaataaggaaataagtaatgatatgtctttgtgcgtttagctgtgaggattttatcccacgtgtggaattactggattagatgcgaaattgcaacatttgtatggctcttgatacatatttctcagtgtctttccaaactggctgtagaaatgtaccctgccatcagaaacatttggagagatatttctactcctcacagattacgtatatttgttaaacaccactgtgggccaggcgctgttctaggcacctgggatacagcccagaatgagatgacctccaatagttgccctcatggaacagacagtcaaattcagaaaaatagacaacaaacaaataattgttcaatatgttagacatgatgtattatagaaatgtagggtggtgatacaagagctaagaagaaattatttaggcagatagggtatgagcgtcctcaataaggttttccttttcatgaaaagcagcccccaaattatttcttttctaacaaagagcagcctgtaaaattgagctgcagacatagacaagcaggctggaaacttgccaggtgaatgccggcagctgtgccaataggaaaaggctacctgggactaggcatgttcaaaatggcggcctcatcttcccttctctttgtcagccacgtgtacagtaaggagcagataacatggcaccagcgaggcaaagatcccatttgcataagattagggcgagccatccagcttccccatgtgctatgtaaacatcacacctggtccaaccaatccttgggccctatgcaaatcagacaccgccccctcaagcctgtctataaactggtgcactctgccatgggtgggaagtcccattcggaagcccctctcacacaagagagagagttattctcctttctctttcttttgcctattaaacctctactcctaaacccacttcttgtgtccgtgtcctcgatttccttggtgtgagaggacgaacttcgcagatttaccccagacaacaacaccgcttcagcgggatccagagaggatgatcagggaagcttccttggtaagataaaattcaagcagacacttgaaggcggcgaggaaggataccatcaaaaatccgtgggaagagcattctagcacgagggaacagctatgcgaaggctctggggcaggaatgtgctttgtgtgcaccgagaagtagatgggtgcagatcatgcagggtcttgtggaccacaggggggactttggctcctatcgtgagtgagggaggagctgtggaagattctgagcagaggaggggcgttacctggctcaggtgttcacaggtgccctctggccacgagagcagatgggaaagaaagcagaagctgggagggggaggaagaggaaaccacactgggttaggtggggggccgtgaccaggtgggtaccacggtgagttaattctggttatgttgagatggtaaagcagacaggtgtggcttatggattggaagtggaggatgcctggaggagaggagtcaagaatgtctcagggattttgacatgagcagtctgaggacacagctctgctatcagctgaggggaagaaaactggggcggggaagtgggagggtgggggtagtgttgggggaagataacaattcactcaccacttcccccttgaattatagaatcaccccacagcagtattcataaagaatgaaaatgcaaacatctattaataattattcgcaaatgctgcatattagccagtttagataaaccctgctctctgggaattttgccagaaaaaaatccccaaataagcttctacagctctcaaagccaataaaatgccatcagggagtagacggagaatggcaaagtcccttcctcatgtgagaatctgtttaatctaacattaccatgccttcatctacccttctgtaagacccaggattgtctgaacacaaagataaacataacagagctatagaaagacgtgaagtgagaaaacaaaataatcgtgggggataggatgtttggcaagactagatgaggacttctcaagctaggagatgattacacctaactagctccactaactagctgccgtagtggaactacgggcagttccactcttctttctctctttgctgcctaaccctcaccaatgctggatggattagaatctgtgtctctgcttccattgttgtttgcggccaccttgatcatacaaactgccctgctgtagtctattgtttatttactcatgcaacaaacaattattaagcttctactatgttgcaggcactgcactggatgcttgagatagagtgtttcggagaccacctgttacccacccacccattatcccctcataacttccctagctttcagaacccagcaataaaacagaactacatttcctgggcacttttgcagagagatgtggccacatgaacagttctggccaatcaaccataaggatgctgatctcaactgacctttgtcctttgaccttcttcctcctttctgtctgaagcactgatgtgatggctggagcagcagcagccatcctgagactgaccatgaggaaaagaccaagctgaccttggtcttggctgaacatccttgggccactgcagcatttttattttatatgcaaccaaataaaattttcgactgatgcacatgtatgttctgaaaaagttgtctttttattagcctgtttctccacataagacttcttgaggctgggtgcagtggctcacacctggaatctcagcactttgggaggccaaggcaggaggaacacttgaggccaggaatttgagaccagctgggcaacacagcgagaccctgcctctactaaaaacacaaaaattagctgggtttggtggcacacacctgtagtcccagcttctcaggaggctgaggtgggaggatcaattgagcccaggaggttgaagctgcagtgagctatgatcatgtcacgacactttatcctgggcaacagcacgagaccctgtctcaagggataaacaaataataaaagtaacagtaaaaaggaagacttcatgagtgcagaaaccaattttatttagcttcataagccctcaagaaatgtcagatgaattcatgaatgagtaaggtagcatgacttttataatttaaaacgcagcaggcccaggaagggcatcttcttcccctattcgctctctgcttgggtgccacatctctggcagtggctgatcccttccgtgatgacagctactgccagcagctcctccctcatcgttccagctgccactggctccaatgttgcaatttcttcaatccaaggattgtaggggcttcctgctattgctagcctctgggtgcccaacatcccacatgggttaactctgtccacacctctgtaaggaagtccttccttttcttttctttctttctttctttttatatatatatttatttatttattttgagacaggttctctctctgttgcccaggctggagtgcattgacatgatcacagcacactacatccttaaccttccagactcaggtgatcctcctgcctcagccccgccgagtagctgggactacaggcatatgccaccacgcctggctaatttttgatttttttgtagagatggggtctcactatgttgcccaggctggtctcaaactcctgggctcaagtgatccacccacctcagcctcccaaagtgctgggatcacaagcatgagccaccacacccagcaaagctcctccttaatgcctcttcctttgaaatatctgggggctggagagtgaactctgtttcctctgtagactctgagagacactccccaccaggtggtaagttcaagggcacagaacacatatccgctttactcactagtaccccggacccagcacaggttctgccatggagaagttgctcaatgaatatttatagaataactaacttcacttcccattaaataaaccagaataaaaataataaggtgatgccatttttgtctattaaattaacaaaaaatatatatatatttttgagacagggtcttgctctattgcccagggtggagtgtagtggtgcactcacggctaactgcagcctcaacttcccaggctcaagcaatcgtcccatctcagcctccatagaagctgggactacaggtgcgtgccaccacgtctggctaatttttgtatttttagtagatatggagtttccccacattggtcttcaactcctgggctcaggcaattttcccaccttggcctcccaaagtgtgagatcacaggcatgagccactgtgcctggcccaaaaaatgtttttaaaacaataaaacccaatgctggtctgtgtgcattgaaatgaatagacttcagcgttgctgttaaatgtgtaaattgatacaaccctttggaaaaaccatatatataagaaaccattaaaatagtactcatttttgactcagtaaaactactcctggaaatctaatacaaagaaatgaatcccagtgaagggaaaatgtatgtaaagatttgattgtagcattatgtataatgtcaaaatatacccaacagtaggttataaggaaaagacccttctataggcattaaaatgacagtatgggatggagggagggagggaagaaggaaagaagggagggagggagagagaaagggaaggaggaagggagagagggaagaaaaagaagaaagaaagaaaaggaaggaagagaaggaaagaaagaaaaagtaagggaggagggagggagaaaaggaggggagaaagggaaggaaaagaaagagaaaaaagaaagaaaaggaaggaaggaaagagagaggtgaaaggagggaaggatgggaggaaggaaggaaaaaatgaacaaaggaaggaaagaaggaacggggcaggaaaaagtgaatgggggtgcagtagtttcaattttacatagctgaggtcgagaaggtgactgtgagcagagacctgaaggaggtgaggcagaaattagtcacaagaataagaaaaaaaatgtaagaaagagatgttaacagttaggtattaacaactgtgtgtggactcattaataaatatctttgagcccctgatccatgctaaggatgcattagaggcaaaactggacatagtctttatcttttttttttttttgagacagcgtcttgctctgttgcccaggctggagtgcagtggcactatctcagctcactgcaacctccgcctcctgggttcaagtgatcctcatgcctcagcctccaaagtagctgggactacagctgtgtaccatcatgcccggctaatttttgtattttttgtagagacagggtttcaccatgttagccaggctggtctcaaactcctgacctcagatgatccacctgcctcagcctcccaaagttctgggattacaggcatgcaccaccatgcctggctaatttttgtagagatgggggtctcactatgttgcccaggtgggtctcgaactcctgagctcaagcgatctgccggcctcggcatcccaaagtgctgggattacaggcatgagccaccgtgagcggccagtccttatctttatactaactaaatgagaaaatcaataagagcgaattagaatgttgatgtgggtaatgaaagaaaggcatatgatgctagaaaaatatatactcagaggtattggggagagagacagatgcatgaatagaggtaaagggatacagagaaagaaaaagaaacaaagagatggagagagagggaaagagagaatgtggggaggaggggacagaaacaaggagagacagagacagagagagatgtcaatgaggtgaattatatttgggactctctgaattctcttttccacagctgaataataacagtaatagcccagtaattagtatacaactgctcaacctctctctcttgcctggagctggcaagaaaaataaccaatcgtactgaagaaaggaccaaggacttagggagaaattgaaagaaaaagcagcctagaaatcatgcattggagaaaaacagaatctgaaggttgtggcaaagcgaagagaccctgagattaggagggaaagtggatatgctttttcttaaaaaaagatatttctaaaggagtttctgatgttaaatgggatctcggcagaatgaaataacaaggcttttaactctaaagccctatccatcttcccagggaatgttcctgacccttcagcaccaaaagcaaacccttcgtacctgtgcttttccctccagttttggtacattgtggacataggtgttcgtttatccaaccaccctctctggtcccatttgtagcagagataatgctatggatctggcaaatcccattttcttttccttcctgggatacgtacagcaaagggacatattccagctctcactgaagttcgttgggccctgggactacattctggctaatggcatttaggtaaaagtgatgtgaaccacttctaagcctaacccatacaaaatgtccagcataattctctgtgtacaaattcagaagcaattaggggaaagcagaggcccttcctagacaatggcaaagccacaagatgggaggaccctgaatccctgcgtcactgcctggagaagagtctcccaggaagtacaaccattatggagaagtttggaggttcctcaaaaaactaaaaatagagccaccatatgatccagcaatcctgccgctgggtatatacccaaaagaaagaaaatagtatatcgaagagatatctgcactcccatgtttattgcagcactattcacaatagccaaaatttggaaacaactcaagtgtccatcaacagatgaatggataaagaaaatatggtacatatacacagtggagtactgctcagccataaaaaagaatgagatcctgtcatttgcaacaacatggatggaaccggaagtcattatgttaaggaaaataagccagggacagaaagacaaacttcgcatgttctcacttatttgtgggagttaaaaattaaaacaattgcactcatggagatagagagtagaatgatggttaccagaagctaagaaggggagtggatgggggtggaggaggaatgtttaataagtacaaaaaaatagaaaagaatgaataagatgtagtatttgatagtacaacagggtgactatagtcaatgataatttatttgtatatttaaaaataactaaaagagcataattggattgtaacacaaaggataaatgcttgaggtgaaagatacctcatttttccatatgtaattattacacattgcatgcctgtatcaaaatatcccatatatcatatatatatacacatatatatataatgtatacacacatatataatatatatatacacacatatatataatatatatatatacatatatataatatatatatataatatatatatatatactatgtacctacaaaaaattttttaaaaagagaaaagcctactgggagaaaacatctatctcggatagttgagtgaacaagaaggacactttcaccatgttcaacctctgagaattcagggtttatttgttatagcagctaatatcccttatcctatctaatacaccatccatcttggacagtagagtgagcaagaaggaaacgctcactgtgttcagccactgagagttcagggcttagctgtcacagcagctaaatcccttatcctgtataatacaccctttccataacagtgtgtgtagattttgagaagagtttacattccctccaattctgcttctaaacctttattttcctgcctttgagaaagaattcatactccttcaaggctcagaccatccatccagcatcttcaccacctcccatctctgccattgtcctctccaagctgtttcttgcctctgtctctttgcccttgcactcatctccacctggaatgccaaaggggcactgcagacaatgtgtgtttcaaccaaaatggacagagatgctgtttgctgctgcaggacagattaaaaactctttggaagcctcatacccatgactttggccttggagatactgctgtccagccactaggcaaaccaagcacacaagctgttaacccagttactaaggcagagagctgggagttacttttgactcctccctctccctcatcccactattctatcagtcaccaagatgtattgattctacatccagatacctctcaaatccatccactttcatcaccattgcttccatcaaattccaggccaccatcatctcttaggataaattccaattctgttaatgtggcccagaggtcctgtgtgatctggcccctgccccaaccccagcctcttccctctcagactctatattctaactgacttggactcctttcaattctttaaatgcaccatattcttttcctgcctttggacctttgagatactgctcccacagccaaaacactcctcttcttctttcccagctaaacttctactcattctctaggtttcagcttaaatgctcctttatccaagaagccttctttgagtttgttaaatggcattcgactctgtgattataaaccatgtcctgcatttagagcactgcatttacctgctagactggtaagctgaccagcagcgccaacatctgcattgttcattattgtgatttcagggtcaagcatggggcatgacatatagtaggtgcttactaaaatattgttgaataaattttaaaaatggatggatggacagatgatttgatggatggatagatgatttgatggatggatggatggatgagtgaatggatgatttaatggatgaatgattgggatagatgatttgatgaatggatggatgggtaaatgagtgaatggatgaatgaatggatggataaatgagtgaatgattgatggaaggatgaatggaagaacggatggctgaataaatttcttcaagatgctgagtgtgaatctgtgactccaaaagaaaccaaagataactatcatctggacaaccctaaaaccagaagttccatgagactacattcttgctcatctttgcttttgtggaccttgaattctctttgggagtgagtagataatggcaaggaagcaaagacaatagaaaacatacaaataaaccaggtggcaccagaagatgacacacaccacatgctctaaaggggtggcatttgatccaagaccccaggcacttaaaattaaaattaaacaagtgagaatgccaattccatgccaaaaatcaagccaaatgatcctcggaatgtgttgactggcaatgatagctgggatttaaaaatagacttatcaacctattatgcatgtcctgcctttgcttcagtaatcactttccccaggtcccaaggaaatacaaaatggcccttaaacagatgacaaggggaccattttcactcataataagagaagaccaattaaaattgtattgagatgccatttttcacctaccttatgggcaaaagcatgataacacacgctgctggcagggccgaggggcaccagacaatcacctgtatcgctgatgggagtggaaactggtacaatctccatggaggatcatttggcaaaattcaccaagattacccatatctttaccctttgacccagcaatccagtttctccaaatttatcccattgtctatgataccctgatatgtttttatctattttttttaattcatttttgaggcagccttgctttgttgcccaggctggagtgcagtggcacgatcatggctcactgcagccttgaacccctgggctcaaggtgatctgcccaccttagcctcccgaggagctaggactacaggtgcctgccagctaatttaaaaagaattttttttagagacggagtcttgctattactcagcctcccgagtagctgggattacgggcatgagccaccacacccagcaactgacatgttttaaaaagtgacatatgtgtggcccatacctgtgatttcagcactttgggaggctgaggtgggaggatttcttgagacccagagtttgagaccagcttgggcaacatagcaagaccccatctctacaaaaaacaaattttgcattggtagtcccagctacttgggaggctgaggcaggaggatcacctgagcccaggaggccaaggttttagtaagctatgattgcatcaccacactcctgcctaagtgacagagtgagatcctgtctcaaaaggaaaggaaaggaaaggaaatgaaaggaaaggaaaggaaaggaaaggaaaggaaaggaaaggaaaggaaaggaaaggaaaggaaaggagggcatatgtacaaagttactcattattagactgtatgtaatggcaggatattgcaaacaacccatgaatctatcaatagaggctggtttaataaattatggaccactacataaaaataataatcatagcctagacacatcacttacttcattcatgcctagcatgattctaaatgtgttatatgtaataattcataataaccatagcaggtgcactctaaccacttttctatgttataggtgaagacactgaagcacagagaggatcagtgacttgcccaagatcacacagcctggaagcagcaaatcaggtcagtgaggggagctggtcccttgaggggctggaagcaggcacaatgatgtagctataaaaggaagaagcccaagagagctgtttgggccaggcgtggtgactcatacctgtaatctcagcactttgggaggccaaggcaggcaaattgcttggggtcagaagttcgagaccagcctgaccaacatggcgaaaccttgtctctaccaaaagtacaaaaattagctgaggagggtgggtggtgtgtgcctgtagtcccagctactcgggaggctgaggcaggaggatcgcttgaactcaggaggtggaggttacagtgagccgagatggcaacactgcattccaccctgggcgacagagggagactctgtctccaaaaaagaaaaaaaaaaaaaaaagctgtttgatgcacaaggatgataaatgacagtgggtcgggccataggatgctgtagggtcaccttctgctcacacacaggttcccaggaagataatggtgggtgggatggaagagggagcctcagtttctctgtcttcctcagctgtctctgcactctcgaccacacagttgtaatattgcctctctgaaaataaggaagcttctgccaaactaatctggaaagatctccaagaacatattgttaggtgaaaaaaagcaagatgctgaactgcatgtagagtatacgctcccttatgtaagaagagaggggaaagtaaaataaatattttacatttgcgcacatttcatgtgtttgcatgaactaactctgggaagacatacaagaaagcaataaatgtttcaggggaaggagatgaaagtggggagggggatggggcagattggggaatggtaggagatgtaaaaggattaactactgaaacattagcatttaattttgaaattgccagagaagcttacgggtacttgagaaaagcatcattcgtctttttttttttttctcactcttgtcgccttggctggagtgcagtggcatgatctcggctcactgcaacctttgtctcccaggttcaagcgattcttctcctgcctcagcctcccaagtagctggaactacaggcgcgtgccaccatgcccagctaatttttgtatttttagtagagatgaggtttcaccatgttggccaggctggtctcgaactcctgacctcaaatgatccacctgcctcggcctcccaaagtgctgggattacaggtgtgagccaccacacccagccgctcatctaattattgacagggcacgtgccttgcagttttcttgagtccccaccactccctattgtctgcctgatgttgaattctcatctcatctaaagctgagttactctcagctccagctccttattgctacccctgaatgtgggtccaaagtggctagcttctcttatttttcaagagaagtggaaaaccatatttttataagaaaccttccagattttaaatgttggcaaggattaaatttttagaaaatgagaatttctgtggcctatatacaacctctgatccagatgaatccagaatctgtgtgtcctcaggaaatcccccggaggttgttttgcttgactgagtggcagagtttgtagcactctaaggacctgtagggcaactgttctacatactgtttgaaaacagagaagtcaagagccaataaaaaaggctggggaggggactccatgtatggttgctcaaggcgtgcactgcacaagtgctcctggccacatgagagagaggagagctgaaatacaactcactgatggagtgcttcatgatggatggatcaagctggtgacatctgaacccttgtcaaattcaacatcactaaatgagaggcagccagacgtgatgtgccacccaatgaagcaagatgtaccagtcatcatcaaagaattatccttgcaaacacaaccaagcataaaacagaaacattgaaactgaatctgattcatcctctagatcagggatcaccaaactatggccccctagtcaaatctagcctactgcctgatcttgtaaataaggtttcactgggacacagccacactcatttatttaagtattgtctgtgccttgctttcacactgcaaaggcagagttgaaaccatatgaactgcaatacctagaagacgcattatccagatttttacagaaaagttcaccaaccccaggtctagatctagccccccgttcacaggaaatacaggggagagaggagcacactaaatcaacaccatgaggcacgcaatcagcagaatccaaagtgtggaacagcctccaggacaaatgatccagtttcttccacaaataaatggcaagcaaacaaaagaaggaggcaaaactgttcaagattccaagagtcttataagatacatcagccaatcagggaaatggggataacgactggctgttcagtgagtcttaaggaaataacagccattttgggtagatgtgaaaatgacatagtgctaaatgcaatataatatttggggttggatcacggaacagcaaaaacggcattaatgaaaaaaagggtaaaatctgaatagagtctgtgatttagtgaatggtgacaaatcacagtaatgtaagatggtaacaacaggaggggctagatgaggtgtatgtagaaacactctattatcttggcaatttttctataaatctaaaattattcccaaatgtaaagtttgttttaagacaatggtcttgtgattgcagttttgttttgtctttgttgtttgaaacaggatcttgctctgtcgccaggctggagtgcagtggcacgatcatagcttactgcagcctccaactcctggcctcaagcaatcatcttgcttcagcttcctgagtagctaggatacaggtgcacaccaccactcctggtaaattaaaaataacaataattgtagtgatgagatctttctatgttgcctaggctggtctcaaactcctggcctcaagtgatccacccacctcagcctccaaaagcaccaagattacaggataatccactgcacctggctagactgtactttctaatacacagtgtctcttagagtctattagattagactccaatcatctgtaacattaacagatacaatgatgcaatgactagactttgctttaaaataatacagcaaagtgcagataataggtgagagcataaagaaactagatttgccaaatattgatatttattgaagtcaggaaatagattcctgaagatcgtctttatgtttctctccattttggggtgagtttgaaaatgttcataataaaaagtggttttgaaaattgttttaaattaagcctacatgcatttaaacatgttccctaggatgggctgtggctgcctggaagaaaggcaactttatcttatcagaaggcactttccaccaaccaggcaatgtgtcctggcttgtagattccctctgcatgtccatcagggtgccgggtgctggcatccctctttgtggaatgatgggatgacgggggtgtctcacccctggagctcctatgtttacccccaacctaactcaaccaactccatgtgacattgtagaatctgcctcaagtcctgttgcatcctcaagtcctgttgcatggctggctgtgaccacaaagggacccaactttcaaacacactttaatttgggtaataaacagcccacaaaaaaattactggagacatctgcaaagaattcttatctttcacaaaagtcatgggaaactacccttttcaaccattccactgggtataaacaggaaaacaggtagcttcgactgcagtggcagctatcttaagattttggctccttgagaggtgaaaatagtgctggatcaaccccatcctgaagcccacaccaccactggacttacagtcatgaaaaccagtaccttcccttgctgttcaatctgcttgagtttgctgtgacttgcagcccaacaccctttcctggtgggaccacataaaactgtatcagttcatgcaaatctgtacagatttgccaagtgagcccaacaatgcatttgagatggtcaaaccaggagtcccagtttaggtcctgctgggagccctaatccaaataatacaggttttaaaaagcattaataaccaggtctaaacagattcaaagcccttttcacaacccctattcaattaagcagccagccacttgtcaaatacttctgcaacccattccctcctctctgcccctgtgaccactcaattctggcctccatcatcatttgcttggactgtagcagtatcttccctcctggttctcctcctctagtatcatttttctccaaccgtcccttacactggccccagatggccttttctaacttacacatctgatcgaggagatggtaaaactttttttttttttttttgagacagagtcttgctcagtcccccaggctgcagtgcagtggcacgatctcggctcactgcaagctctgcctcccagtttcacaccattctcctgcctcagcctcctgagtagctgggactacaggcgcccaccaccacgccggctaattttttttttgtatttttagtagagacggggtttcaccatattagccaggatggtctcgatctcctgacctcgtgatccacccgcctcggcctcccaaagtgctgggattacaggcatgagccaccgcgcccggccctaactttttttttttttttttttttttttttaaagagacggggtctttcttttttgcccaggctggagtgcagtggcataatcatagctcactatagcctccaactcctggtctcaagtgatcctcctgtcacagcctcctgagtagttaggattacaggtgagtgtcatcccaggcacctaatttttatttttttagtttgttttgtagagacgaggtctcactatgttgcccaggctggtctcgaattcctggcctcaagtgattctcctgcctttggcttcccaaagtgctgggatcacagacgtgagccaccacgctggcaaaactctttaataactctctctttctaattgtggcaaaattcacacaacataaactttaccatcttaaccatttttaagtgcacaggttagtagattaagtggtcatgtggttgtacaagcatcagcatcatcaatctgcaaaactttctcatcttcccaaactgcaactctgtcaccattaaactataactccccattccctcttccctacctgctggcacccaccattctactttctgtctctatgaatttgactactctagggaccttatataagtggaatcatatagtatttgtccttttgggtcaggtttatttcactgagcacaatgtcctctgggttcatccatgttatggcacatatcagagttccctcactgagaatctcattgtttaggaatttttatggaagcttcattttgtaggcatgattcattaaatcactgaccactggtgattaaagagatgaaagagctcaatctccagcttctctccactccctgggggctgaagggtgggattgaaaatcccaaccctggccgggcacagtggctcacgcctgtaatcccagcactttgggaggccaaggcgggtgtatcacttgaggtcaggggttcgagaccagcctgatcaacatggcgaaaccccgtctctactaaaaatacaaaattagccgagcatgatggaacatgactgtaatctcagctacttggaaggctgagggaggagaattgcttgaacctgggaggtggaagttgcagtgagccgagattgtgccgttgcactccagtctgggcaacaagagcgaaactctgcctcaaaaaaaaaaaaaaaaaaaaaaaagaaaagaaaatctcaaccttttaatcatatcttggtttttctggtgaccaggccccatcctgaaaccatctaggcaccccgaaccaatcattagcgtacccaagagactcttatcattcaggagattctaagggtcttagaagcttttgtattaggaaccctagactaagactgaacataacaaaagatgctcctatcatctttattactcaggaaattacaagagttttaagagcgctgtaccaggaatcagggatgaagatcaaatatgtatttcttattatatcataataacagcagaggacactatttaacctactgaagtaatacaagcagtaaagtaggtgtggaaaaactgaaatggtgtctggaatcaacaaagtgtgggacacaaccagacaagaaatcatttgacccctaactctgtcacccactctgtgtcctgcaagagctggcttcaccttgagcatgtcacaggaactggggacagagaccaagtattttttattataccacaggttgatgacctcattccagcccctgaataggccatttctgaaaccggacattacgtcagcccctggatacagccattcctgaaacctgacagtagttcaccccctggatacaaccattcctgaaacctgacattatttcagcacctggatacagccattcctgaaacctgacaatagttcaccccctggatacaaccattcctgaaagctgaccttatttcagcccctggttacagccattcctgaaaactaacattatttcagccccaggatacaaccattcctgaaagctgaaataaggtcagctaccttatttcagcctctagatacagccattcctggagcctacatttaaatgacttgagtcaataaatcccccttaccccagtttttaatctaagtctgtttgcattgtgtctcttgcaatttaaagaattctgatagatacccctgggctatcccgtccatctggaatggcctccccagcccaccacattcattagcctgacacactctggctcacctcccaccttgacccaatgcttcctcctctgggaaggcttccgtgattccatagagcaaacctaagggtgcctatttcactccgaacattcctccctgcagcattcatctggcaccgtgacgattgttgatttctgtgttggctgccctagattgttcgttcctgaggggtgagcactgtggtctcttcgtgtttgtgttcccagccctgaccccagcagcatccagtaaatagctgttgtgttgaatgaaccagtaagtgaatgattaaatagtaaaaagtgttgccttcctctgacaatggatttatttttaaaaagggtaagaaaaacaaaaggctgtaccactgatggtggctgcagggctcatgcatgcattctctcctctgattaaatagcaggcaaggtgtgtgggaagggaacagagggacctcagagacaggcagataaacgagtgggtggctcttgccagcagtaagcctttctttcatctgctgtatggccaacccctgcccccagtgcccacttgccaggctaatctcctctggatccccagaaacaataagaaataatttgtctgaggggggaatcggatgggaaagggggaggaagatatgtccattccattccagctggctccagctctcccccactgctccctgagctagccgaatgcatcttctaatttagttcattcttctcttcctagccattggtaatagacccacacagaacacttggaatttaaccatccttcctccccataagagaaagggagagtgagaagatatgcaaaagagacatagaaaggggaaagaaaagaagggaaaagataaaagaagaatgatcacagtaatggctaagaaatatcattcttactatgcgccaggcacttagctgacaacctaacatgtattaactcaattcattctccttgaaactgtatgggataggttccagtgttatccttattttacaaatgagaaagaggagcaaaaataaagtagaggacaaggtagggatttttgttttttcagagacagggtcttgctctgttgctctgacaggcgtgcagtggcacgatcatagcttgctgcagtctccatctcctggcaagtgatccttctgcttcaacctccccaggcatgcaccatcatgccagtctgagttttgtttgtttgtttgtttggtagagataggatctgcctttgttgcccaggccggtctcgaactcctggcttcaagaaatcatcccacctcagcatcccaaagtgctgggatcataggtatgagccactgagcccaggcaacaaggcaggaattttttaaaatctttctaaatgaaggcactggtggatccccagctctggaacacaaaacagagtaggtgctcactgaacaatactgaatgaaggtttgaaagaaatcctagcccatactgtaaagacatcatcatcaacatcatcacccattactaagtggaaaagaacatgttataaagcaacagataggtaggagatgaattttgcttatctttatacatggatgggaaaaattctgcaggaccattcaccaatagtggggatcatcttgcaggagaaatcagagatcaactcaaacacgtcaaaaacattgatttaggcctggcttggtggctcacacctgcaataccagcactttgggaagctgatgtttttattcacacttaaaactaggaaaatgtcaattgtccatggccaagaattgtgcggtggggtggggaggcaggagagatccatttattggaagtttaaaaataagaataagttagacatcagaataatggggtatagactcagaaggggtgccaaggcaccttgctggggggtcagggttgttctccatccagatgtgggtgatgttcactagttgtatacatctgtaaaaatttgtggtgctctgaacttaaagtatatgcatttttatacatcttgtcaaatgtatcttgacatcccaatttttaaaaacttttaaaatgcaaaatatttttgaattatcgacgagcacaatggcttggctggtagaaggctgctgctggagactgtaaaaggctaacgccccaggttgtaccgtgggcccatgttgtaccgtgggcccaggttgcttgtcgcccctgaggaggaaggagttagctcatccgtgccagctcccttcccatgacaacaggagagtgcagcacttagagacactggtctcagcactttttaatctgagagctttggaaaagcctccgagtcgggggaggaagaggagagctctcagaagaactggctggcaagatgctggggtggtggaaaaaaaagatgcttccaaggcaaaaaaaaaaaaggattaagaaccagctctgatgggatctgaatacactgccttggaggctggagagatttccacccatttctgcctcctctagagaaaaggcaaaaaaaaaaaaccctccagaaatgcaacatttaagcttcactaacaaaccccgccccaccaccaccaccaccaaaatgaaaatagagctcacttaaaaaaattattttttggctgggggcggtggctcacgcctgtaatcctagcactttgggaggccgaggtgggcggatcgcttgaggccaggagtttgagaccaggttgggcaacaatgtgagaccccgtctctactaaaaatacaaaaattagccaggtgtggtggcacatgcctgtaatccccactcctcgggcatgctgaggcaggagaatcacttgaacctgggaggaagagattgcagtgagccaagatcctaccactgtactccagcctgggtgacagagagagactgtctcaaaacaaacaaacaaacaaaataaaaacaaaaaaaattaaccctctaaagaatatttatccagaaagcattcccaagaaaactaggtacaaatactagatcagcctcacaaagaaaacacacatatatttttgtgttccatgactgtctagttggctggcttgggtgcgggcaggtatcccagggtccagatactacacctatagaactgtcatctaaccagaaacacaaaaatagaggcagatttctctgttcttcagcgctcaagtgctacaccactaagatttcaagactaggaactggctttgctcctggaaatgaacagaaaaggaacttttaggctaacccagggagaaagacagttatgattgtgagcgtgaagttatccgcaagtgaattatgcactttatgagtaaaggttgtaagtttttgtccttgatcagtcacctttgccactcctggatgtagaagagaaaggtggtgtctaccagcgtcctgggcatgggatggactacatttcccagatgcccttgcaattctgtgtggtcatgtgaccagggaaatgggagaggttgcaggtgcctgtttcagatctggattaggtagatagttaccacaaaggaaaatatttgtgtatctaaacatatctaaccatagaaaaaatatagtaaagacatgatataaaagataagaaatggtacatctatataggacattcatcagaaatggagcttacaggactacaggctaattcagtgaagagtgagtgagtgtgaaggtataggacattaccatacactactatagaatttacaaacaccccggtcgccccatctgggaagtgaggagcgcctctgtccggctgctgtgcaaccttccaagtgtgaagtgatagccttgtgtgtgatcttttctgtcttcccccaagtttgcatttttgacattaaagtttactttttaattaaaaatgaaaaaaaaaaaagaatttacaaacactccacacttaggccacgctacatttacaaaaaacaactctttctttcttcaataataaattaccctagtttactataactatttttactttattaactttttaatttaaaaaatttttttgtttgttttttgtttgtggagtgttgctcttgtcacctaggctggagtgcaatggcacaatcttagctcactgcaacttccacctcccgggttcaagtgattctcctgcctcagcctcctgagtagctgggattacaggcatgtgccaccacgcccagctaatttttatatttttagtagaaacagggtttcaccatgttggccaggctgatcttgaactcctgatctcaggtccacccacctcagcctcccaaagttctgggattacaggcgtgagcaattgcactagccttaaaaactttttgtaataacactttagtaatcgaagattactaaatctagatgctggtgctttttgtaataacactggaataacactgataaactttagtaataacacttagcataaaacacattgtacatctgtaaaaaatattttctttctttatatccttattctatatgcttttttctatatttaattaaaaaatagttttatttctaaaacatttttgttaaagtttaatacacaaacacacattagcctagtactatacagggtcaggatcattaagacgtcactagaaaatataaacgttttagctccgttagattttttttttttttttaatgagacagagtctcactctgttgcccaggctggagtgcagtggcacgatctcggctcactacaacctctgcctcctgggttcaagcgattctgcttcagccttctgagtagctgggattacaggcacacaccaccatacctggctaattttttttttgtatttttagtagagacggggtttcaccatgttggccaggctggtcttgaactcctgacctcaagtgatcacccgcctcagcctaccaaagtgctgggattacaagcatgagccaccgtgcccagccttccatgataatcttacggggccactttcacacatgtggtctgtcattgaccaagacatcattatgaggcacatgactgcatttatttatgaaatgacccgagaaaacaccagtagggcagaaaggaagtgagacaaggaatcgaaggcagccagtgagtggtgtgttgttgaaccaggtaccactgtgggcacctgggactgaataacactggtgagttctgggaagcagagtggaacatagaccttggaggcatccacccaagtgggagggagctggagtatttaaacaccaaccctcagtagtcattgttgggcctgctccccagcacttcaggcttgccttggttgcacacatagagaactttggctgccaggacataaagatgcagttgctgtcagccgagaattgggctggaaggtatagatatgggaagtgccagaaggatggcacgcggaatatctatagtatcagcaatggcagaaccacacaacagaaagaacctgggctcctgaatgactgcctggagcagagccactgtcatcaacctagaccgtagcaacttgaactgtaacaattgagaggaaaatactcccaccctctttaaggcattgaaatattaatagtattggggttctttgttaacagcagcctagccttatcctaacagatatatcagcctttttttctactgagcctgagagctgcaatttcagagagaagagcacccaacattgaggatttgcagttttgatgcatcatttcactgagtgttcctgagaagcctctgccaactcatttggtagcccaccaataataacccctcagtaaattttgagggagggagtacacccaaaaatgctggaagttaacacccctggaaacaattaatgtcctcaacccatgagtaatgagaattgttggataaataccccagctccctcacctctaaagtaggatgcctgaggtctatgctatcctcctccagtgcttcctgatggggctgagccccaattgcccacagtgatgacttaataacataccattcactagctaccttcccttcccttccctctttcacttcccctctcgcctatgggtatttcctggagtaacctcccaaatgactattcgcacttgaattcttttctcagagtctgcctcaggagaccccaaacgaagcctggggataaattattatcacctttaatgcacagaccaggacacatagaaagaccacagtcatcccaggttatgcagcaaggaggtaacatagctgagacccaaattcccatcttgactccaggattcaacctcttaactccattgctgtccagcaagctggacttctccacaagggaatcctcccccgtcaagcacatttatgggtaaagccaccctcatcatctctttcccacaggcttgtgactgtccaggctttaaatataaatttggcaaacatttattaagcacccacagtataccaagtactaacaccacattgattcattgaccctgctctcaaatagctgaaggtcaaactagggagcaaatatttgaagggagaaacaccaaaccaactgggaggttgtaatcatggctgctgctcactgctcaggctgttacaatggtgaaatataccacataagttcatagatagccactgtcctgagttatgatggttaattttgtatgtgaatgtgactgggctatgggatgcccagatatttgcttaaacatgatttctgggtgtgtctgtgagggtgggtattagcccgttttcatgttgctgataaagacataccagagaccgggtaatttataaagaaaaagaggtttaatggactcacagttccacatggctggggaggcctcacaatcatggtagaaggcaaaaggcacatcttacttgacagcagacaagagagaagaaccaagtgagagggatttccccttataaaaccatcagatctcatgagacttattcactaccatgagaacagtatggggcaaccacccccatgattcagttatctcccaccgggttcctcccacagcacatggaaattatgggagttacaatttcaagatgagatttgggtggggacacagccaaatcatatcagggtgattctgaaagagattagcgtttgcagtgggggactcagtaaagcagatggccctccgcagtgtagctgggcattgtcccatctgttgaggggctgaatagaacaaaaaagtggaggaaggttgaattaactctgctggactgcggagctgggacatcaattttctcctgcccttggtgctcctggttctcaggccttcagacctggactggaatcagccctctggttctcaagccttcaaaatacaccaccagctttcttgggtctccagcttgcagatggcaaatcaggggacttcttagtttctataattacatgaaccaataccttatagtacaccctctcctacatgtatacacatgtaaggccaacaggataaatatagacatagacgtggatatacacgtgggtatgaatagacatagatgaagatggacataggcatagatggagatggagttagagatataggcttcatcctattgtttctgcttctctggagaactttgattaatatatgagtacccctgagggccccccacctgctctctgggtccttcctccaagccaccctagacctccttttgacccatcaaataaagggatagggccaggcatggtggctcacacctgcaatcccagcactttgggaggcagaggcaggcagatcacctgaggtcaggagttcaagaccagcctggccaacatggcgaaaccccgtctctactaaaaatacaaaaattagcacagcatggtggctcatgcctgtaatcccagctagtagggaggttgaggcaggagaatcacttgaacctgggaggtgggggttgcagtgagctgagaattctggaattctagaattcagttctggaatatagaattcctagaccaaggtttcaacacgccacttcactccagcccgggtgacagagcaagactccatctcaaaaaataataataataaaataaaaataaataaagggatagttcgggcactcaggaaaaccctgggctcccagtccctagctatgggtcatgtgcacactgatgggctgatgcctgtgccagatctgattatcatagagatgcatcctcagtggggaggacaaggaaggcgtcatccgctttacctgagctggtcaggtaaggcccagactaggttgtttttttattaatccagaaaacagcaacctatggtgggtataaagttctttggtgggggtgataaaaatgttacgaaattagatggtgttgttgattatacaatctagaacgtgctaaaaaccactgaattgtacactttaaaggggtgaattttaaggtatgtgagttatagcccaataaagctgtttatttatttatttatttatttttgaggcaagatctcactctgttgcccaggctgggatgcaggggcacaatcacagcactctgtagcctggaactcctgggctcaagccatcctcctgcctcagctccctgagtagctgggactacaggtgcaccaccatacctggataattttctttttttttttttttttggtagaaacaaggtcttgctatgttgcccaggctggtctcgaactcctggcttcaagagatcctcctgcctcagcttctcaaagcgctagaattacaggcgtgagccactgtgcctcgccaaagctcttgttttatttaaaggaaagaaaacaacagcctaaaccccatttcctgacacccccgtgcatcgagattggggccagagtgaggagaatgagcactggctttgagcacaaaattaaacacttacacgctgggctatttgagtttgctacggctgccgtgacaaggcaccacactgagtggattcagcaaaaaaacagactgtctctcagttctggaatctagaattcatagatcaaggtgtcaacggggctatcctccctctgaaggtgcggaggaaggatttgttccaggtctctctcctggcttcaggtcgtctctcagcatatggcagcacaactccaatctttttattttatttatttatttatttgagacgtagtctgactctgtcgccaggctggagtgcagtggtgcgatcttggctgactgcaacctctacttcctgggttcaagcgattctcctgcctcagcctcccgagtagctgggattacaggcgtgcaccaccacgcccagctaatttttgtatttttagtagagatagggtttcactatgttggcaaggatggtctccatctcttttttttttttttttttttgagacggagtctcactctgtcacccaggctggagtgcagtggcgccatctctgctcactgcaagctctgcctcccgggttcacgccattctccagcctcagcctcccgagtagctgggattacaggcgtgcgccaccatgcccagctaatttttgtatttttagtagagattgggtttcactatgttggcgaggatggtctccatctcttgacctcgtgttccgccccccttggcctcccaaagtgctgggattacaggcatgagccaccgcactcggccccacaactccagtctttacacaacattctcccaagtgcacatggctgtgtccagttttcccctttctatatggacgacccactcacattggattaggggcccacctcatcttaactaattatgtctccaactatgtctgcaatttccaaaaaagttcacattctagggtactcaagatgctatagtcttaatgttgtgtctctccaaaatttgtatgtttttttgttgtcatttctggtttttttgtttgtttttgttttgagatgaagtcttgctctgttgtccaggctggagtgcagtggtgcaatctcagctcactgcaacctctgcttcctgtgttcaagtaattctcccacctcagcctcctgagtagttgggattataggcacccgccaccacgcccagctgatttttgtatttttagtagagacaaggtttcaccatgttggccaggctggtcttgaactcctggccttgagtgatccgcctgcctcagcctcccaaagtgctgggattacagacgtgagccactgccccagcccactatttgcatgttgatacttagtccacagtgcaatagtattaagagggaggactttgagaggtgattaggtcatgagtactgcaccttcacgaatgggaatagtgcctttataaaagaggctcaagggtggttcatgcctgtaatctcagcacattgcaaagccaagacaaaaggattgctcgagcccaggagtttgagaccagtctgagcaacacaggaagatcccgtctctaccaaaaaatttttaaaattagccaagtgtggtggtgtgcctttgtggtctcagctattcaggaggctgaggcgggaggattgcttgagcctgggaggtcgaggctgcagtgagccatgattgcaccactacactccagcctgggcagcctatctcaaaaaacaaaacaaaacaacaacaacaaaaaaaaaaagagagagagattccaaggagtctgcttgccacgtccactatttgaagacacaatgtgctgtctatgaggaagggccctcaccagacaccaaatctactggtgccttgatcttggacttcccagcctccagaactgtaagccataaatttcctttgtttataaattacacagtctaagacattttgttatagcagcccaaacagattaaggcggggcgttaggaccttaacatatgagcgtgaggggtaggagagggaaacatttcaactcatcacacatgccaagccatattgcatcctgaggccaaaggaaaaatctgaaatactgatcttgcttttattgagaaagttgatatttttgctcatcatggatttttgcattgatttttatttctgaaattattgtactaaaatgttatttaccttgatctctgaatttgttggtactcttagagtttgtgcctaacgtaagcacctcccctacctcaccccagtcctggcccagtctggcttgcttcatgattttcaaagtccgcaacaagtggcttccccaccacatgtgcaaattctccctccacccttggatgggatttgtttaggcccagaaagtttaaaggagctgtggtgttttgttttgttttgttttgttttgttttgttttgttttaatctgcctctgcctaggtcactggcttcatttcctccttcattgaggctgttcttcctgccttctttgaagacttttgcttttttccccagctttgttgagatataattgacaaataaaaaatggtgtacatttgctatagtttggatgtttgtgtccccaaacctcatgttaaaaattttattattatcattattagtttacagacagggttttgctctgttccccaggctagagtgcagttgtgcagtcatagctcactaaagtctcaaactcctggttataagtgatgctcctgcttcagcctgctgaatagctgggactaccgacatgcactaccatacctggctagttgtttgtttttgtgtgtgtgtgttttgtttgtttttgtataaacaaggtctcactctgttgcccaggctggtcttgaattcctggccccaagtgatcccacctcactttcaaaagtgtggggattacaggcatgagccaccgcacctggcctcatgttgaaattttatccccaatattggaggtggggcctgatgggaggtgttttggtcatgggagcagagtggatccctcgtgaatggcttggtggctttctcatagtaacgagtgagtgacttctcactctattagctccagcaagagctgattactaaaaggagccctggccgagtgcggtggctcacacctgtaatcccagcactttgggaggccaaggtaggtagatcacctgaggtcaggagttagagaccagactgaccaataaggtgaaatcctgtctctactaaaaatacaaaaattagccgggcatggtggtgggtgcctgttatcccagctactagagagactgaggcaggagaatcacttgaaccggggaggtggaggttgcagcgagctgagatcgcaccactgcactccagcctgggagacagaacgagactctgtctcaggaaaaaaaaaaaaaaaaagagccccgcacatctccctgccctctcttgcttcctctctcaccatggatctccacacactgggtccccctttcccttccactatgagtagaagcagcctgaggttctcatcagaagcagatgctggtgccatgcttctggtacagcttgcagaactatgaccaataagcctgttttccatttgtgtacccaaggagtacctgaagctgggtactcttttatagcaacacaaatggactaagataatatttcaggtgtacaacatgatctttgataatgtgtgtacatcgaaaaatgattaccactatcaagcgaattaatacatccatcacctcatctggttaccatttagtctgtgtgtggtgagaacatttaagatatatccttttagcaaatttcaagtagacaggctgggtgtggcagctcacgtctgtaatcccagcactttgggaggctgaggcaggtggattacttgaggccaggagtttgaaaccagtctggccaacatggtgaaactccgtttctactaaaaatacaaaaaaaaaaaaagagccgggcatggtggtgggcacctgtaatcccagctactcaggaggctgaggcaggagaattgtttgaacacaggaggcggaggttgcagtgagccaagatcataccacggcactccagcctaggtgacacagcaagactccatctcaaaacaaaacaaaacaaaacaaatcaagtagacaatacagtattcttaactatagtcatcatgctgtacattaactccccagaacttactcatcttgcctaactcaaagcttgcactgcttgactgacatttctgcatttcttccctgcccccagtcccgggtaaccatcattctactctctgcctctgtgagtttgacttttttagattccgcatgtaagtgagatcctgcagtatttgtctatgtgtagtttatttcacttaacataatgtccttcaggttcattcatgttgctgcaaattacaggatttccttcctttttttttttttttttttttttttttttagtaggatctcgccctgtcacccaggctggagtgcagtggcgcaatcatagctcactatatgaactcctgggctcaagcactcaggcgatccttctgcctctaactcctgagtagctggaattataggcgggagccatcattcccgactattctgtgattctatttgaataattcaggctaggcgcaatggtatacgcctgtaatactatcactttgggtggccgaggcaggaggatcacttgaggccaggagtttgagaccttcctgggcaacatagtgagaccctgtctctacaaaaaaattttaaaatagccaggcatcgtggtgtgcatctgtagtcccagctacctggaaggctgaggctggaggatcacttgagcagaagtttgaagtaagctatgatcacaccactgcactccagcctagatgacagagtgggaccctgtctctaaatgataataataataatggcccgggtgcggtggctcacacctgtaatcccagcactttgggaagctgagacaggtggatcacctgaggccaggagttagagaccagtctggtcaatatgatgaatccctgtctctattaaaaatacaaaaattagctgggtgtagtgacgaatgcctgtaatcccagctactcaggaggctgaggcataagaatcacttgagcccaggaagctaaggttgcagtgagccaagatcgtgccactgcactccagcctgggcaacagaataagactctgcctcaaaaaaataaaaataaataataataaaagaaaagaggccgggcgcggtggctcacacctgtaatcccagcactttgggaggccaaggcgggcggatcatgaagtcaggagatcgagaccatcctggctaacatggtgaaaccctgtctgtactaaaaatacaaaaaattagctgggtgtggtggcaggcaactgtagtcccagctactcgggaggctgaggcaggagaatggcgtgaacctggaaagtggagcttgcagtgagctgagattgcaccactgcactccagcctgggtgacagagcgagactctgcctcaaaaaaaaaaaagaaaagaaaagaatgattcagtcctgcctggatcattctgctcaccttccatgggcttcctgtcccatgtagatggccaccatcttgctaagaactagggaaggtagagtgagagctggagaagagggaatcgatccagtattagaagaaccatccaatgaggttattttggaaagagctattttaacctgctacccactttgatacacatggaaaatatctcaaactacagggaagatctgaacgtgacagatctcataatcagtgagagggataaataggaagtactttcatagcactcactatatacctgacacatcacatttattagctaaccttatgagattgatatgattgcgatccctttttctttttctttttttcttttttttttttgagatggagtctcgctctattgcccaggctggagtacggtgatgtgatcttggctcactgcaacctctgcctcccgggttcaagtgattcttctgcctcaacctcccaagtagctgggagtacaggtgcacaccaccacacccagctaatttttgtatttttagtagagacggggtttcaccatattggccaggctggtcttgaactcctgaccttgtgatccgcccgcctcagcctcccaaactgctgggattacaggtatcagccactgcacccggctgattgctctcccattttacaggtgaggaaactgaggcccagagaggtgaagtgactcttccaagaccacacagctagtgagtgtggcagagccaggatttgaacccaggccatttgaccctctctcccttctttgacctgctctgctatagctgcctctattactagtattgctataataatattatttattattctaataatcataataatattaaccaccatggatattgaacacaaatcattatttgattgtagcacctatccagccctgcatgatctggagagactttatttactgtgcatcagacactggtctgatttccatctggggtgatgaaactgttttggaactagaggtgatggttgcacaacatcataaatatactaaatgccactgaattgtttgctttaatatggttaactgcatgttatgtgaattttacatctttttaaaaattctaaatcaatagccaggcatgggggtgagggcctataaatcccagctacttgggaggctgaggtggaaggatcacttgagcccagagttttgaggctgcagtgagctatgattgcaccactgcactgcagcctgggcgacacagagagactccgtctctacaaaaaaaaaatttttttttttgagacagagtcttgctctgtcgcccaggctggagtgcagtggcacgatctcgactcactgcaagctccgcctcccaggttcatgccattctcctgcctcagcctccagagtagctgggactacaggctcccgccaccacgcctggctaatttttttgtatttttattagtgacggggtttcaccacgttagccaggatggtctcaatctcctgacctcgtaatctgcccgcctcagcacccccaaagtgctgggattacaggtgtgagccaccacgcccggccaaaaaaaatttttaaattagctagacatggtggtatacacctgaattcccagctacttggaaggctgaggcaggaggattccttgagcccaggagttcaaggctgccgtgagctatgatggcaccactgcactccaacctgggtgtcaaagcaagaccatctctaaaaaaaaaaaaaaaaaaaattgaaatcaaatcatgttactcccctgcttcaaacctcctatggctccccattgcacttagaaaaaacaagcacacatatattcattgcagcagtattcatgatagcaaagatatggaatcaacccaaatgttcatcaataacagactggaaaaagaaaatgtggtacatacacaccatagaataccatgcagccataaaaacgaatgagatcatgtcctttgcagggacatggatggagctggaagccattatcattatcctcagcaaactaaaacaggaacagaagatcaaacaccacatattctcacttataagtgggagctgaacaatgagaacacatggacacagagaggggaagagcacacgctggagcctgtcatcggtgggaggaggagagagagcatcaggataaatagctaatgcatgctgggcttagtacctaggtgatgggttgataggcacagccaaccaccgtggcacacgtttacctatgtagcaaacctgcatgtcctgcacttgtatcccagaacttaaaataaaattaaatttaaaagaaaaagaaaaaatgacccagcctctccatgctggtctacaggagtctacataatctgactcctaccaacagcatcttctacttctctcccccaactcatcccattccatcctcaccagcctctcttctgctcctaaaacatatcagggtcatcgctgcctcaggacctttgcactttctgttccctcagcccgcaacacctatccttgcatcctcagtggctgcctccttctccccattcaggcatcactgccatctcttgagagaccttctctacccaactgctcacccctccttagcccatctcataatgacccctgaaaacatctctcttcaaaataatctgaaatgatgtgcttacttttgggcttaatcatttattatctgtctttcctgtgaaaatgtaaattccggccaggtgtgttggctcacacctgtaatcccagcactttgggaggctgatgtgggcagattgcttgaactcagaagttcgagaccagtccgggcaacatggcgaaaccccatctctactaaaaatacaaaaattagccaggtgcgatggcacgtgcctgtagtcctagctatttggaagggtgaggcaggaggatggcttgaggctgggaggtcaaggctgcagtgagctgtgattgcaccactgcactccagcctgggtgacagagcgagaccctgtctcaaaagaaaaagaaaaagaaaaaaaaaagcaaatgtaaattccacattgatattatccaccaccagactccaggccttagcatgttgtaggaattcaacaaatgcatcaactctacctcattagcaccttcagtttctcttggttcaatggccagtggctcccgggagtaaaggcatgggattccaaaaagaaatgtaaacatgttaatattataggtcctgtattatccagccatttctacatcccgatgagaagctactggtccccagccagatccctctgacccagctgggggtctgtcccaggctactgtgagttgggctgtttttttgattttggggttttgttttgtttttgtttttaagagataggatcttgctctgttgcccaggctggagtgcagtggcgcaaacacggcccactctgccttgacctcctggactcaagtgatcctcctgcctcagcctcccgattagctgggattacaggtgcatgccaccacacccggctaatgtttttttatttaattttttgaagaaatctgggtcttgctatgttgcccaggctggtctcaaattcctggcgtcaagtgatcctcccacctcggcctccgaaagtgctgggattataggcatgagccacgatgcccagttgagttcttagtggctcccagacatccccttagctgatgggcgttacgtcaccatgagatgcctgggttagacccatgacccctcttccgggaggcggccactgcctgtagctggctgagcctggggtttaagagcccagacccagacgggtacggtggctcacacctgtaatcccagcagtttgggaggccgaggcgggcggatcacgaagtcaagagatcaagaccaccctggccagcatggtgaaaccccgtctctactaaaaatacaaaaattggctgggcgtggtggcgcatgcctgtagttccagctattccagctactctggaggctgaggcaggagaaacatttgaacctgggaggcagaggttgcagtcagccaaaatcactccattgcattccagcctgggcgacagagagagactctgtctcaaaaaaaaaaaaaaaaaaaaaaaaaagagcccagaccccttgctcatataccctggtgggtagatcaccctgaggtgaatcaatgagctcctcaccatccggaacctcccccaggatcaggtggaggctgaacttgggctgaaccgcatccttgatcagcttcttcctctgccctgtgctgcttttctcattctccttagaccaccgattctcaaactggaaacactcccagaggtcctgacttaattggtaaggcacgaggcccagccacacggatttttaaaaatctccccaggcaattataaagtgcagccaacttagagaagcactgcctcagaggtctctcctgagaacaccccctttgtaagctccttacccaagaatcgccagcgtgggctcctcttccaggaaatctgacctaacgcacttgctgtccactgaaagcgcctactagcagctaggacccaatgccgggggtgcaggaattcctcttccaggcccagagcccagcccacagccagggtggccttctggtcatgcagatggagcagcaagaacgggggtgggcaaaagggggcgatgagagaaagcatgtgtgagagagaaaggcgggggcaggagggagagagagacagggggacagacagagacccaaagagagagacagagagagacacaaagacagagagacccaaagccatatggagagatacagagagagaatggctgggtgcagtggctcatgtaatccctgcattttgggaggccgaggcgggcagatcacttgaggtcaggagttcgagaccagcctggccaacatgacgaaaccccgtctctactaaaaattcaaaaattatccaggcgtggtggcgcatgcctataatcccagctactcgggaggctgaggcaggagaattgcttgaacccgggaggcagaggttgcagtgagcagagatcatgccactgcactccagcctggctgacaaagcaagaccctgtctcaaaaaaaaaaaaaaaaaaaaaaagaaagaaagaaagaaaaagaaaagaaaaaagaaagatacagagagagacccaaagagagacagacagagagacccagagacagagagagacagagaaaataagagaaagagacagagagatccagagacagagaaagagcaacacacacacacacacacagacacacacacacacacacacacacactggtgcagggaggctgttggaggaagagagaacaaaagagagagagggtgatgcaaagacagagatagagatccaaagggagagagagaaaggggcagaaataaaaagacagagacccaaagaaagagaaagaaagaaagaaagaaagagacccaaagagaaagacagagagaccgagggaaaacagaattcagatagagagaaacagagacagatgagagaggaataggaagccccttctctctctctctctctctctctttctctgtctctctctcagatggagtctcactctgtcacccaggctggagtgcgtgacttgatctgtagttccagctacttggaaggatcagtcttggctcactgcaacctctacctcccaggttcaagtgattctcgtgcctcagcctcctgagtagctgggattacaggtgcccaccaccacgcctggctaattttttgtattttagtagagacagggtttcaccaaatcgcccaggccggtctcgaactcctgacctcaaacgagcctcccgccttggcctcccaaagtgctgggattacaggcatgaaccaccgctcccagccctgggcagccccttctattcagtccttcgccctcggttggcatggcatctctgctcctcgccccacttggaatacccagagaccactggccggggagaaggagaagagcatccaggaaggctcttggccaccttatctgacactgccaaggtagctcctccccagggctccttgagccgctcaccagcttcagtttgttaaatttagctcagattcctttgctctgagtaaattgcgtctttgcaaaggagcagaagaggactaaacctgtttacagtgtttgaaacccactcactaaaatattttgcaacgatcacaataatgactctgatttccatgccggccgcctctcaggagctggggttggtgcagggaccaagggtgccgcctggcgtggcatgtgaacaactgcacgctgagctcaggcaaacctgggttcaatcccagctctccaactgacctgccggggggcctttacacgtggcttttaatgcatcccataaatggtatatcagtgattccccatctcaccggctttctgtaaaaagattaagtgaaatgctggaggctgagccactacaactggcaaaatttaagaggacaataggttggtggttacagggcacaagatccagagtcaagctgcctgggttcaaatgccacttgtaccccatatgacctaggacaagttacctagtccctccgtgcctgagtttcctcgtctgctaaatggggataatgctaatggctaactcataggcttcttgctccattcttgattgttttcctacttatcttttggtttcagctcatgagtcccttagaaagctattgctaggctggcgacggtggctcccgcctgtgatcccagcactttgggaggccaaggtgggcagatcacttgaggtcatgagttcgagaccaggcctggccaacatggtgagaccctcccccccatctctaccaaaaacacaaaaattagctgggtatggtggcgcacacctataatcccagctactcgagagactgaggcaggagaatcgcttgaacccgggaggtggaggctgcagtgagctgaatttgcaccactgctctccagcctgggcaacagaatgagactctgtctcaagaaagaaaagggaagggaaggggaggggaggggaggggaggggaggagaaagaaagctgttgctaatccatcagttatacctctcttaaagcatttacctcattgggacagtctatggcaatgattttgaattcattgagggcactgactataatgtattcatccatatatgcctgatggataacacaggagctgatccacatcaacccctctgacttcatttcccatcactcccacctcactcaccttgtcccaaccaacaccagctgtcttgctgatactcaaaacacaccaggcacattcctgcctcagggcctttgcacttgctgttctctctgcttggaacttcctttcccaagaactttgcatggctggctcatcctcttcattaagcactcaattcaaatatcagttcaccagatgaaccacccctaaccaccttttcttaggttctcctgtttcagtcacgttttaccccatcgcagtgttattgtcaatctcactgcctcaaattattgtattatctatttactagtatattatctgttttcccttataaaatttaaactccatgagtgtaaagtccttgtctgatttgttctctgcctccaaagtgttcagtgataagttggtgaggtgatgggtatgttaattagcttgattgaatctttccataatgtacacataggttgaaatatcacattgtagcccatgaatatatacaattgttgtttgtcaattaaagtcatttttaaagctgcttgatgaatctctgttgaatgattaatgaatgaacctcatccacttccatcccttctataactatgtctatgtagcacttactgtgtgccaagcactgttctaagtaatttgcatgtattaattaatttgatgctaacaatctctctgagaggtaggtgatgcaattatcatccccatttcatagttgaaaaaaactgaggcacaagatgttggtccagtaactggtatacaagccaatgaaatctggatttggtatcagaagtggggtgccgttaaatgcactaagattacaaagctggtaagacgttgggccaggatttgaagccaggcactgtggctcctgagcctacaggcttagtcactctgttcaatttctcacagttccccaaacactatttctacccacttttagtctcttctgctctgttccccaatttcttatagcctcctaggcaactccactttgactctccccaaactagaaatctcagatttccctttgaactcacctgttctttcacttcctagatgaagtggtacttaacttgtttataattcagggagcctgtaaatttggttgggaaaattcgcatattcattacagcctctagctgtaattatgcatggaggcaacaaattgcagcaatattagcagtgttcatgacacctgtgactttgtcatcaacagaaaccacatctcagctgggggcagtagctcacgcctgtaatcccagcattttggaaggccaaggcaggtggatcacttgagctcaggagtttgagactggcctggggaacgtggtgaaacccccatctctacaaaaaaatacaaaaattagctgggcatggtggtgcacacctgtagacccacctactcagggggctgaggttggaggatcacttgcacctgggaggtagaggctgccatgagctgtgatctcaccactgcacctgggaggtagaggctgccgtgagctgtgatctcatcactgcactccagcctgggcaacagagtgactctctctcaaaacaaacaaccaaccaaaaaacagaaaccacatttttattatgtcacattgtaattattgcagatatcttgaaactcacttactctcatgactaccttgaagttgttaggtctgttactagctcttgttatttatgcattatgaaagaaacacattagtgatgtatgacaaatctgttctttcaaatatttttataactaatgttcaatgtaattgatttcctctgcatttgatattatgcacttaaaaagcacaattctgagaagagatcccttggcttttgtcaaactgaagagagctccacggctcagaaaatgttaagaatcttcacgccagccaattagcaagtgaatcctattgattctccttctaaagtgtttcttagatcctctccccacctttattcccaacactgctgtcctagttcagctatctcctgactcactggcattgcccccctccacacctccctcttgctcatcttcccctcccagttttaaaaatctatgacaaaattaataactagtatttacactgagttttagggtttacagcagatgttacaaactcagagctcacaaattacttccttgatctatccacatcttaagataaaaatatgttcagaacaagtcaggagattacatataaaagtgaaatttttgctttttctcaaaaactcagacgatttacccgagctgagcctacattcctgcatgacagcaatcagcttctattgaataatggttatatccttcagatgagcctggagctatctagtttgccaaagacctcaccactctctaatgtctccctgacatggaagctgccccagtcaccattacccacttggcccctgtagacaattgagtttagcaaccctggatttcaaagtaccttatttgatccttataaaagccctgcagagtgtgtatggtacagattcttatcctgttttacagatgatgcaactgaaaactcatgaaagttaaataaaacacagggtcacgtaagagtagaaagagctggcatttttctctccagactctgtacttcccactgacctggactcttttcagaaattactttgtaaaacaccattatgatgtgttgaagtgcatggtctcccatcaaaagacctccgatgctactcaggaggctgaggtgggaggatctcttgagtctaggagttcaagaccagccttggcaacatagtgagaccccgtcgctcaaaaaataaaataaaataattagccaggcatagtggtgtgcacctgtagtcccagctacttgggaggctgaggtgggaggattacttgagcccaggagttccaagctgcaatgagccatacacgattgcaccactgcactccagccaatggtggacagacctccaatagcctggtcaatgaaaatgggataaatcccaagcttcccaaggtgatatctgagctccttcaaacctggcagcctcccttgcagcttctgctttcaagtttgacacgccccttctttaaagtcagacttttgaatgttcaattatgcaaagccaccatgctataaggaagctcaagctagccacatggagagaaagaatatactgaaaaagctcatgtttggtgcaaacatgtgagtgaaacctcatggactgtccagccctgccagccatcaacataacgcagctaaatgagagactgcattatgttgagattacagcagaaccacactcctgagtttgcaaacccaccttcttatctatttgagatactcacgtgctcagacacaaaaactaaagataaagacgtgagtaagtagatcaaacacactgcagggaaggttaaaatatgtagctaccagtaggaggcactatccccagagcactgattgtcaggaggcatgggaggacccaggaagggacttgggtgggtgggggagctcactaggggcctccaggcaacagctatttactaactggtgtggaaatattttaatattttaacaatcagctgtgccaatgtgtctcagctgaatatctgccctgaatacacagaaaggagattattgaagccaaaagaataagaatccaagccgtgaatcatactgcaatcattccgccttggcttagaaatggattagacaccatcatgttttttcattccccagtggattttaaatttccaagttggtataaacctgggggcctctgctgagtgtatcataagtaaagtggaacgtgatgactcgcacactggctagaatcgcctgggaactttatttttattttatttgtatagcagcagagtcttgctctgttgcccaggctgaagggcagtggcatgatcataattcactgcagtcttgacctcctgggctcaagcaatcctcttgcctcaacctcccgagtagctgggactacaggtgcatgccaccatgcctggctaaattttaaacaaaatttttcgtagagatgggatcttgctatattgcccaggctggtctcaaactcctggcctaaagccaggagccaggcctcccaaaagcactgggattgcaggcatgagctaccatgcccagcctaccaggtaacttgaaaagtgctaatgccaggaccctacatccagagttggatttaatggagtagggcctggacatcatgatttttaaaacagcccagatgattgtgcagccaaggttgggaaccactgatgtaaagccatgcttcttaaaatgcggtccacaaaccagcagcagcagcatcacctaggagcttggagaaatgcagagtctcaggctctgctgggacctactgaatcagcaaccccaaggtgaacccagaaatatctgtgttttcacaagcccgaaggggggggctgatgtgtgctcaaggaccagagagctggcagaatgaaagatccactacctgtttctcttgcaagaccgccatgccacatggacgcaaggtcaatgaaaaccctccaaaactccactgtgccatgaacatgctggggtctccaagtccagcacacaggctaatctggggctggagactttgttttttgtttttgttttgagatggggatctcactctgtcacgcaggctggagtgcagtgctatgatcacagctcactgcagccttgaactcacaggctcaagcgatcctcccaccttcccaccttagcctcccgagtagctaggaccacaggcacgcaccaccacgcctggctaattttttttttctttttttctgtacagatgggggtctcactatgttgcccaggctggtctcaaactcctggcctcaagcagtcctcccacctcggcctcccaaagtgctgagattacaggcatgagccactgtgcctggccatgggctggagattttggacacagatctcaggagactgaaccagactctggaaaattggctgtgcttgtgggagccaaccaagggaacatttaaggtacgcctgagaggtcccaccaaagggggaaagaaaatgggtgaaaatgagtcctaccctctgcaattgagaagcccaaggagctctccaacgggctgcacctgctcctgctttagggagcctcttttttttttttttctcgctctgttgcccaggctggggtgcaatggcacgatctcggctcactgcaatctccacctcctaggttcaagcaattctcctgcctcagcctcccgagtagctgggatcacaggtgcccgccaccacgcccggccaattttttgtatttttagtagagaaagggtttcactgtgttagccaggatggtctcaatctcctgaccatgtgatcctgccaccttggcctcccaaagtgttgggattacaggcgtgagccaccgtgccccgccaagcgaacctttttaaatggggacatcctcattctaaggcaagcactgaagagttccagaatgttcccgcaggcccacccgcaggaccaatgcacggactccgtgccactttgtgatggattgtagtcatgcgtgtctactgaaaagccttacatattgtgccttgggtgctgccctgtgttccgaagcttgcttctagggcctgtgcactcagccgtgaacatttaaatggcagctttgagacaaggcctcagctgttctctggtccagacataagaagccagagctttgaaaatggacccagttcggccaggtgcagtggctcacacctgtaatctcagcactttgggatgccgaggcaggcagatcacctgaagtcaggagtttgagaccagcctggccaacatggtgaaaccgcacctctactaaaaaataaaaattaaaaaattagccaggtgtggtgggcaggtgcctgtaatcccagctactcaggaggctgaggcatgggaatcacttgaacccagaggttgcagtgagccgagaagtgcaccactacacttcagcctgggggatacagtgagaatctgtctcaaaaaaaaaagaaacaaagaaacaaagaaaatggacccagttaaacttgtatgaatttgagaaagttttttttaaccattctgggccctagtttcctaatttaaaaaagggaagaggtgagccagacactgtggctcattcctataatcccagctacttaggaggctgaggcaggaggattgctaaaggccaggagtttgaggccagcctggacaacatagaaagacccctgtctccacaaaaaaaaatttaattagctagtgtggtggtgtccacctgtagtctcagctactcagaaggctgaggcaggaggatcacccgagcccaggagttcaaggctgcagtgagctatgattgcaccactgcactccagcctgggcaacagagcgagaccctgtctctttatttatttggttttttttttttttgagacagagtctcgctctgttgcccaggctggagtgcagtggtgcagtcttgactcactgcaacctctgcctcctgggttcaagggattctcctgctgtagcctcccgagtagctgggattacaggtgtgcaccaccatgcccagctaatttttttgttgtttttagtagagatggggtttcaccatgttggctggtctggtctcaaactcctgacctcaagttatccacctgcctcggcctcccaaagtgctgggattacaggtgtgagccaccacgcccggccccctatctatttaaagaaaaaaagagaagaagaaggaatttgcacatatatcctatatatttgcacaaataaaaaaataaaaattaaattaaaaggagggaggagtaattaaagatatgattttccaagattgtcctaaaaataaaaaagagagtatgagtgcctatggcactgattggcatgtggacaggataacgtgcttcataaatgttaataagaaaaataaataggccttcctatttgagacttaagggcgtttgatatcaccatctctccagaaaggaccatctgaaacatcctctcttagttcccattaacctctcactgtgatttatagcagaagttagcagtcaacgtcctgcaggccagatacagcccactatctggttctttacagaagtctgcaaatcctagatttagaggtcagattttcatctctcagccacaaacacattccaacctcatatcttgctttcacccagcctttactaaccacctgctatatgctaggctctggtgaaacataaccaataagataaagtccatgcccttttggaggtcacacctcggagtatgggtgggaatttgttcatttcacttaatttaacaggcctaaccaggtgcagtggctcatgcctgtaatctcagcactttggggggccaaaggtaggcagattgcttgaggtcaggagtttgagaccaacctggccaatatggtgaaaccctgtctctactaaaaatacaaaaattagccagacatagtggtggatgcctgtaatcctagctactctggaggctgaggcaggagaatggcttgaacccaggagtggaggctgcagtgagccaggatcgcatcgctgcactccagcctgggcaatagagtgagactcctttcaaaataataataataattattattattattattatttaactggccattcctgcttataatgtgagatgcactgtcctaagcatttttcaaatgcttaattcttgtaatgaccctatgaagtgactgctatttttttcctgcattttgcaggcaaggaaacagaggctcagagaggtgaagtcacttgtccaaggtcacacagcaaatagttagaaccagggtgtgaatccagccagactagctccagagccaataagctccacagtctccttattcagaagcccttgacctagcatacagatggaggcactacacataaatattgaccaggcggtgcccagaccacagaaggaaaaaaaaagaaagtgacttatccttcaagacactgttatttgaacctggccttgtcagtgctctctcccagactttctgcactaggaactgttgttatcttccttcagtgctcagagaggctgtggcagttgcccagggtcgcccagctctaacaggatgagctgggattttcaaggtggctccttttgtccccagatctgtcttttgcaacatatgtggggccctccagaggaatttcaccaggcaagaatggccttcttggatggcaaaggaatacatttgatttgcaacgtggcatttcagagagatagtgggattggggttttgttattgtagctctttgttttttgctttttggtgttttttgaggagtctcgctctgtcacccaggctggagtgcagtggtgtgaccttggctcactgcaacctctgccttctgggttcaagcaattctcctacctcagcctctcgagtagctgggactacagatgtgtgccaccaccacgcctggctaatttttgttgtttgttttctgtttttttgtttgcgtgtttgttttttgtttgtttgtttttgtttttttgtattttttagtagagacaagttttcaccaaattggccaggctggtctcaaactcctgacctcagatgatctgccctcctcggcctcccaaaatgctggggataatgggattgttttttaagttcattgtcaccattagattttgacccagcactcatctctatgtggacttggccttcatttcttcaattgtgatctgagcattacaagacctgccctcccaaatgtcgttttcatggttgcaagagacagaggaggtgaaaggactgtgagaatttggaaatatcagaaggtgaggtcttattttattttaatcccagttcggtctctttcaagctggttctagtggccaggacttagagaatgggttgtatgtgccatgctggccttcaggattgtatagatttcatcctaagtttgtttgagacttcacacaaccaagtttgacagacatcacgtgctttctacctgcaaagctctgtgcagagcactcccatagcttcaagggtcaaataagaaaagggacttgcctttgtagagtttaggacttgaagggcagggaaaaggttaatgatcacaatttcattcattctccctttcattcattcagtcgtcctttcattcattcgttcattcgactctatgccaggcatttccaagttcaagaccttgaaaaggcaggagttaagaacatgggctctggattctgacagacctgggttccaaagctggttctaacttattggcttcattatttaacccctctgtgcctcggttgcctcctctgtaaaatgggtactggggttagtaacccatgagctcatacccaaagccccttggcctagggctgggcccatggcgggtgtggaataaatgggaactggtctctgtgtagctcatagacattgtacagctgctgtttgcatgtctgcctcctcctccaggcaggcccccttgagtacagtgcataaatgtggaaccagaagatcccctgggcagagaatggaaaagaaaatagggttcacttgctctaagaggctttcaggtctcaaagccagagccacgaagaggtgatccacatagatgttcaagttcacaggggtccatcagttattcactcaacaaacattggtatctattatactctaggcacttttctaagcactagagacacggtagcagaaaagacagaccagaaacaaacagacaaacctgcccttgtggaactgacaatccaatttagaaagaaacacgtaattttatataatgagcagaatggctctgcaaaatgaacagtcgccccaggagaggggctctacaggagaaggtgacatttgtgctgagaccacagtgtgtgaaggagccagccatgggaagaacattccaggcaggaggaacagcaagtgcaaaggccttgaaaatgcaggggacagaaggaaagccaccgggactcaaccaaagtgagggcaataatgatggaatcatgggcagagagtcatgggcagagccctgcaccaaggttcaagcagttaagggagcctggagtgtggacagacgccatcaaaagaaccctgaaggccgggcgcggtggctcacgcctgtaatcccagcactttgagaggccaaggcaggtggaccatttgaggtcaggagttcgagaccagcctggccaacatggtgaaacctcgtctctaccaaaaatataaaaattaaccaggcgtgatgacgtgtgcctgtgatcccagctacctgggaggccgaggcaggagaatcacttgaacctgggaggcagaggttgcagtgagccaagatcgccccactgcactccagcttaggtgactgagtgagactctatctcaacaacaacaacaacaaaaataaccctgaggtgttgaaaagatagaattttggagtgacggtgacagaataaaagacaaggatcagtttgggcacagtggctcgtgcctgtaattccagggactctaaaagctgaaggagaggcatcacttgagcttaggagtttgagatcagcctgggcaacatagcaagattcaatctctacaaaaaataaagtaaaatataatagccaggtgtggtgccacatgtctgtaatcttagttacttgggagactgagttgggaggactgcttgaacctgagagtttaagagtacagtgagctatgattgtaccactgcactcctgcgtgggtgacagagtgagaccctgtcaaagaagaagaggaagagaaagaggtagaagaagaggaggaagtggaagaggaggaaagacagggatcagcggtaggcaagcagaagtatgcagaccccacaagaagaaaagagggccaggcgtggtggctcaggtctgtaatcccagcactttgggaggctgaggcaggcggatcacctgaggtcgggagttcaagaccagcctgaccaacatggagaaaccccgtctctactaaaaatacaaaattagccaggcgtggtggtgcatgcctgtaatcccatctactcaggagcttgaggcaggagaattgcttgaacctgggagacagaggttgtggtgagccaagatcacaacattgccctatagcctgggcaacaagagcaaaactctgtctcaaaaaaagaagaagaaaacgaagacaggaggccggacgcagtggctcacacttgtaaccccagcactttgggaggccgaggtgggtggatcacctgaggtcaggagtttgagaccagcctggccaacatggtgaaatccagtctctactaaaaatacaaaaattagctgggcgtggtggtgtgcacctgtaatcccagctactcgggaggctgaggcaggagaatcgcttgaacctgggaagcggaggttgcagtgagctgagatcgcgccaccgtactccagcctgggtgacagagtgagactctgtatcaaaaataaataaataaataaataaataaataaataaataaataaggcatagttgttcccaggattggaaacccaaggtacagataaattctagatggaaaagtcacattgaacagagaggataatttggcagtgggggtggtgggggatatttgttcataagctgcttgggtttcaaggaccagcatggagaatctgatagaccaaaagagataggggagccccatctctggggggccctacccagaccttccatggctgccaaagctgctaattcaaagaacaaaagaagggtctctctgcaccaaaagtcagccagctgcactgaaaaagaagctccctgggaccagacctattttttttaaatatcaactaggctagaattggccagcctgcctcccttaagaaaagaaagaaagaggccgggcgcagtggctcacgcctataatcccagcacttcgggaggccgaggcaggtggatgatttgaggtcatgagtttgagacaagcctggccaacatgctaaagcctcatctctactaaaaatacaaaaattagccaggcatggcagctaatcacagtgggtccctgtaatcctagctacttgggaggctgaggtgagaatcacttgaacctgggaggcggaggttgcagtgagctgagatcatgccactgcactccagcctggacaacagagcaagactcctgctcaaaaaaataagtaaataaaaagaagaagaagagaaagagagctctgatttctaagtaggttcttttttaaaggttaggttgcagtttaattgtgatgtctaaacaaaacaacctgcttttctttctttttttttttttttttccaagacagggtctcactctgtcacccaggctggagtgcagtggtgtgatcatcactcactgcagccttgaactcctgggctcaagcaatcctcccatctcaccctcccgagtagctgggactacagttgggcaccactacacctggctaattttttttttttttttaattacgtgagcatttttcgtagagacgaggtctccctatgttgcacaggctgaccttgaattccggggctcaatcgatcctcccacctcagcctcccaaagtgctgggattacaggcgtgagccaccgtgcccagcctcttttttttttttttaactgtgtaaactgaggcctcaaaatgcttaatggcatacccgctacagaaacagaaaactattaccaagtacttactatgtggctgcactgttctaaatgctttctatgtaataatgcagtgaacttaatctttgtaagagccccagagatgggtgctattgttttccccatttgacagagagggaaactgaggcaccgaaagggaaaggaaccctcctccccagaatcagtcagcaagtggcagagttgggatttgaaccctggccggggcactcaaccacaccccagattgaagccaggtaagccccacacttgacctcaggacctgcttgtaacccatcagacctcagggagccctgcaaagccccgagtccgcccctgccgccccagttggtctttaccaagccctttgtgcatgaaaaagcaatagccatatatgtaatgattagttatcacatgatgggaattcaattattgatttggggctgacttccatttctcggaacaggcagaaaggaagcggcagggaggtgggtactccggagagcgagctgagcgctctgctgcccggcgcctgccaggctggggagccatggcgccacctggtggccagtcttagcagcggcgggcgacagtgggtgaacgcaggggagacccgcgcaggctgctttttgagcacagtgtgtgtcaggcgctgttccagctcaggggtccaaaaacctcttcgataaaggacctcagatgaaatgcttccggctctgagggctagacagtctctgtcccagagacagctctgccgttgtaacacaaaaggagccacagacaacatcagcacaaatagaaaaggctgtgttccaataaaactttatggacaccaaattttgaacggcatacaactttcacctatcaagaattatccttctttttattatacgacaacaaaaattaatgaacgggtcgggcgtggtagctcacgcctgtaatcccagcattttgggaggccaaggtaggtggataacctgaggtcaggagttcgagaccaacctggccaacatggtaaatgaaaccccgtctctactaaaaaatacaaaaattagctgggcgtggtggcgcgcacctgtagtcccagctactccggaggctgaggcaggagaatcgcttgaacccgggaggctgaggttgcagtgagccgagatctcgcccctgcacaccagcctgggtgacaccagaccggcccacgtggagctcacagagcaaatatggcagcaacaagggagaaagccgatgcgtaacacatatgagctggtcgtgagtgctagtggggaaaattaagcggggcagggaaccaacataagtaggggttgcattttattttttttcaattctatttatttatttagagataggatctctctctgttgcccaggctggagtgcagtggtgcaatcatagctcattgcaaccttcaactcccaggctcaagcagtcctcccacctcagcctcctgagtagctgggactacaggtacgcatcaccatgcccagctaatttttgtaaagatggaatcttgccatgctgtccaggatggtctcaaactcctgggctcacaggatcctcctgccttggcctcctgagtagctaggactacaggtcccagtacagtcaacgagggaggaagccccatatgtaacacataggatctggttatgagtgctagtggggaaaattaagcggggcagggaataagcacgagtagggctgcattttattttatttttatcttatttatttatttatttatttatgagacagggtctcactctgttgcccaggctggagtgcggtggcacgatcatggctcactgcagccttgacctcccaggatcaaaggatcctcccacctcagcctcccaagtagctgggaccacaggcgcacaccaccatgcctggctaatatttttttgttttttgtggagatgcctcactatgttgcccaggctggtctcaaactcttggcctcaagtgatcctcccgccttggcctcccaaagtgctaggattataggcatgagacactgcacccagccggggctgcattttaaatagggtgatgatgaaaagtttgatgaggaggaaacctttaatcaaaggctggaaggaggcaaggaagaagccgtgtgggtgccgaggagaagagcattcctagcagaaggaacagccagtgcaaaggccctgaggctggaccaccctggtgcattggaggaacagtgataaggttagtatggctgcagcacagtgcacgagggagagagaggagggaggtgagggcagggaggtgacaggggcagggccttatgggtcttggtgaggactttggcttttgctatgagtcaggtgggagccatggagggttctgagcagaggagggatataatctgacttgtgttaaaatatgatctctctggggggctgagcatggttgctaacacctatgatctcaatgctttgggaggccgaggcaggaggatcacttgaggccaggagtttgagaccagcctgggcaacatagcaagaccctgcctctacaaaaaaatttaaaaattttccaggagtggtgacacgcacctacggtcctggctgctcaggtgaccgaggtgggaggatcacttgagcccaggaggtcaaggctgcaatcagccatcattgcaccactgcactccagcctgggtgacagagtgagaccctgtctctaaaaataaaataaaagtctcactttgtgtgtctcattctctcagctcaggcctcggggaccaggacaattcaggccacccatccgatccctagctgggaaagtcacccagtcctagctggtgacctgcagtttggctgagcctgggtccccatatcctataagtggtcagttctggcctggaattcaaggtcacaccatctctctcttggcttggctctcaaatgcctcagtaacctggaattcacctctccgggtctgttcacccatctgcataagggacaaaataataagggtactaccggtcataacaagtaatcatggccgggcgtggtggctcactcccataatcccagcactttgggaggctgaggtgggtggatcacctgaggtcaggagttcgagaccagcctagccaacagggtgaaaccccgtctctactaaaaatacaaaaaaaaattagctaggcgtggtggtgcatgactgtcatcccagctatttgggaggctgaggcaggagaattgcttgaacctgggaggtcgaggttgcactgagccgagatcgcgccactgcactccagcctggatgacagagtgagactctgtctcaaaaaaaaaaaaaaaaaaaagtaatcataataagatactaagtaaccacaataacaatagcaacaagagctgccctagctgtttcaggagatcgttgcgtgcatttgataagatgtgctgcaacgaaacactttggaaaacaataacctgcaccacaatctatttataacaatggtgatgaggactaatcgagtcaatgcatgtaaaggtcttggagccgtgccccacagatagtaagtgctccatcaacactgggtttttgtttggtttttgagacagagtctcactttgtcgcccacgctggagtacagtggtgtgatctcggcccacggcaacctcccctcctgggttcaggcgattctcctgcctcaccctccggagtagctgggactacaggcacgcaccaccacacccggctgatttttttgtatttttagtagagacggggtttcaccatgttggccaggctagtctctaactcttgacctcaagcgatccacctgccttggcctcccaaagtgcttggattacaggcgtgaaccgccatgcccagtcaatactggttattgccgggcacagtggctcatgcctataatcccagatagtccagaggctgaagtggaaggatcgcttgagcccgggagtttgagatcagcctgggcaacatagtgagacccccatctcaaaaaaaaaaaaaaaaaaaaaacacctggttgggctgggcgcctgtggaattacgcgcctgtaatcccagcactttgggaggccaaggcgggtggatcacgaggtcaggagatcgagaccatcctggctaacacagtgaaaccccgtctctactaaaaataccaaaaaaattagccgggcatggtggtgggcgcctgtagtcccagctactagggaggctgaagcaagagaatggcgtgaacctgggaggcagagcttgcagcgagccgagatcgcgccactacactccagcctaggtgacagagcgagactccgtctcaaaacaaaaacaaaaacaaacaaacaaaaaacatggttattattattattatggcctaagaagtattattaatgatactcatggtagttcccttaactctcctctctctgctccccattcacactaatgttctctctattctctgatgaagatgacggttcagcagctcgctgcttacacccaggcagcgtcagcctcacctggcagcctgttagaaagaaatgcaaaatcccaagtcttagcctagacctgttgaaacagaatctgcatttaacaagaccccataggccaggcgcggtggctcacacctgtaatcccaagattttgggaggctgaggcaggaggattgcttgagcccaggaggttgaggctgcagtgagccatgatcgagccattgcactccagcctgagtgacagaacgtgactctgtctcaaaaataaaaataagaaaagtattgagttttattagtccttaactgatggttgacccaaatccacttgactggctggcactggctctcattcactgtcagtcaatgcttttactcaagagatattttatgagcacctactgggtgctggcctcagtctctggggatacagctgtgaacaggacagacaagcaacctgattggggatactccagtgggcaagacagaccactagaaatgagataaataacaattccagtgaatggcaatgtattgcagtctgcttagacctgcatgagtgattgatggactgggatgttggctgataaagtggacacgtggctttaaaagattcctgcctagaaagcaaatattgagaccggacgcagtggctcacacctgtaatcccaacacattgggaggccaaggtgggcggatcacttgaggccaggagttcaagaccagcctagccaacatggtgaaaccccgtctctgctaaaaatacaaaattagctgggcgtggtggcaggtgcctgtaatctcagctacttgggaggctgaggcagaaggatcacttgaacccgggaggcagaggttgcagtaagctgagatcacgccactgtactccagtctgggtgacaaagcaagactctgtctcaaaaaaaaaaaaaaaaaaaagagagagagagagaaagaggattgaagaagatagtaacagaagcagaaatgagcaaagagaccaaagtctgtcagtcatgagaagtaatcacggtggtgatctaattcaatcgctatcagaaggtggccagaaaacattcagaattctcatgaagacaatcggtgaggtgaaatcacgtaagcctcactgtggcatgtaccgtgcctgggtggggttcctactggtggacaaaaccaccacagttataaaaataaagcttccaaacagcaatgaagaatggaagatgcttaggagatgcagtagcttacatgtataatcccagtgatttgggaggctgagacaggaggatcacttgaggccaggagtttgagaccagcctgggcaacatagtgagaacttgtctctacaaaaataaaaaattagccaggtgtggtggtacactcctgtagtcctagctactggggaggctaagaagggaggatcacatgagcccaggggttcaaggcttcgctgagctatgattgcccccactggactccagcctgggtaacagaggaagatcctgtctctaaataataataacaataacaataataataataggagacattctacaggatgatttatctggtttattctcagagtcaatagggtagaaaataggggatcagaaagagactgctgtagactaagtaagacatagaagacatgactaccagaaaattaaatatagaattatcatatgatccagcaaccctgcttctaggaatatatctccaagaatggaaagcagggtctccaagagttatttgtacacctatgttcatagtagcattattctcaatagcccgaaaatagaagcaacccaagtgttcatggatggatggatggatggatggatggatggatggatggatggatggatgggtgggtggatggatgggtgagttggtggatggatggatgggtgggtggatggatggatggatgggtgggtggatggatgggtggacgggtggatggatggatggatggatggatggatggatggatggatgggtgagtaggtggatggatatgtgggtggatggctggatggatggatgggtggatgggtggatggatgggtggatgggtggatggatgggtgagtgggtggatggatatgtgggtgggtggatggatatgtgggtgggtggatggatgggtggatggatggatggatggatggacggatggatggatggatggatagatggatagatgggtggatggatggatggatggatggatggatggatggatggatggatagatggacggacaaaatgtggtctattcatacaatggaatattattcagctttaaaaactaagaaaattctgacacatgctacaacatggataaacctggaggacattatgcttagtgaaataagctagacacaagaggacaaatgctgtatgtttctacttatatgaggtccccagagtcatcagattcatgagacagaaagtggaatgatgggtgccaggggctggggagtgagtgtttcatggagacagagtttcagtttggagtgatgaaaaagttctggagatcagccgggcatggtggctcatgcctgtaatcttggcactttgggagctgagcggggctgaccacttgaggtcaggagttcgataccagcctgtccaacatggccaaatcccatctctactaaaaatacaaaaattagctgggcgtggtagcaggcgcctataatcccagctactcgggaggctgaggcaggagaatcccttgaatccgtgagatggaggttgcagtgagccaagatcatgccactgcactccagcctggaagacagagcgagactctgtctcaaaacaaacaaaacgttctggagatggatggtggtgacggttgcacaacaatgcgaatctacttaatgccactgaactgtatgcttaaaaatggttaaaatggtcaattttacgttgtgtgtattttaccacaataaaaagagagagaaacgatgaaatgcaacacacaagccttcttgattcaaaaaactcaactgtaaaaagatgagcaaggaaatctgaatgtggaccagaaattagatataaaaatcatgattaatattgtcagtgtgatgtgattaagatgtgtctgtgtgctttagagatgtagtctgaagtttgcaaaaatcacataaggtcagggatttacttttaaacatctcagaaagaggatatggatttatgatgtgagtctggcacaatcctgataattattaaattttaatggatacgaaagtctcactgacctctttttcctacttttagtgtattggaacatcttcagaataaaaagctctcacagagcacggtattcaaaaagcgaaggcaaacttctaaaacataagggtagaagcgtgttgtactattaaatcaaactattaagccatttggaaatatatatatcttgttgatgtctcatccttttcacgtttttatttttatgtgtattttacagtgcatataacacatttagcaaaatatttttataaattatatataactaaaaatgcatgggccgtggctacgcatttcagctatgagtgtgctcaaaaattgttttgctggctggggtaggagttcagaagtttggagatcatggctataaggacgctttgggccaggcatggtgactcatgcctgtaatcccagcaatttgggaggccaaggcaagagggtcgcttgagcccacgagttcgagaccaacctgagcaacatagcaagatcccatctttaccaaaaaaaattgtttttaattagctgggcatggtgtcatgcacctgtagtcccagctacttgcaaggctgaggtgggaggatcgtttgaacccaggaggcagaggttgcagtgagccgtgatagggccactgcactccagcctgggtgacagagcaagaccctgcctccaaaattaattaattaattaaaatttgtaaaaatgaaaataaattaaagaaacttttatgggttctagaaaccaaggcagacgttaaagggaataggtgcttttcctggttatttatggaatgatggatgggtggatggacagattggtatataagatgataggtgggtggatggacggaagaatgaatggaagaatggatggaagaatggatggatgaatgggtgaatggaagaatgggtgagtgggtgggtgggttgggtggatggatagatgtgtggacaggtgggtgaatgggaagttggttggatggctggaaaatggatggatgggagaaagaacagggaggtggatgaatggattgatgggtagaaagatggatgggtgatggacggatggatggatggatgcatgcacaattagaagtttaaatgggtgggtggtgggtgggtgagtggacagatgagtggatggaggggaggttaagaggaacccagttttgtggcaggtggtggggaagtcacaacatgccttcctaaatgatgctcaaacacgccagtagatgtcagactaacctcaggaaaccacctcggggccaagcttgcaccaccctggccccatcctgaagttctttgattcaaaatgagcaaaggctcattttaataaaacagtttgcattgcaccctgtatttacacactccctcaccagcaccctcccaactcaaatggcatttataaccccacttcctctcctgcaaatggaaaaatggggccagggtgggtgtctggtgaagggtgcttcccacagggtcaggtcgggagcatcaagagggtaagagagtaaattttggggtcccctaaattgattagtatccatatcagcctcagctccaatcaaaataatatttatattctcatcccacactcctgatgtctgctcaggaatccaccctaggcctgtgcctttgccaaaaaaaaaaaaaaacttttgaggaaaaggaaagtaaaggggaaggggaaagggaaagagaaaagaagagagggaagggaagggaagggaccctgtctcaaaaggaaagaaagaaaagagaaagaaataaaaagaaagaaagaaagagagaggaaggaaggaaggaaaaaagaaaagaaggaaggaaggaaaaaagaaaaggaaggaaggagagaccctgtcaaaaaggaaggaaggaaggaaaggaaggaaggaagaaaggaaagaaggaaaaaaggaaggaaggaggagagagagaagagagacactgtcttaaaaggaaatgaaagaaaagagggaaaggagagagggagggaaagaaagaggaaggaaggaagggagggagggagggagggaaggaaggaagggagggagggagggagggagggaaggagggaggaaggaaagaaaaaacccagtagctcccccactgtgtggaaaaggatgcgtaggggccggcctgagactgaaccttcacacaaaccaccttcaaccctcgaacagccaagaccccagctcaggaaagccattcatccaacattgcccagcagcaactacatgacagagccagttccacccccagtgtctcccaccagaagacccacttttggggtcactgacaaagagaaagggggacccagaaccagactcaactgaagccaccacgtactcccagccctatctaggtccctctctgccttcacacacttctgtcttcagccctgaaacccgcagatttcaactcaacactggaagtagaaatgggattcccacgtttttccccagaaagcagcatttctcagccatctcaacagaaatatttgctggctgagcgcagtggctcacgcctgtaattctagcactttgggaggccaaggcgggtggatcatttgaggtcaggagtttgagaccagcctgaccaatatgatgaaaccccgtctctactaaaaatacaaaaattagccaggcatagtggcgtgtgcctgtggtcccagctacttgggaggctgaggcagaagaatctcttgaacccaggaggcggactttgcagtgagccgagattgggccactgcactccagcctgggtgacagagcaagattcagtctcaaaaaaaaaaaacaaaaaaaaaaaccagaaagaaagaaagaaagatttgccaacccatcagagtggacactcacaatcctgggagcctggtcctggctgccccatccatggttaatctctgttgcctcagcctggggcagctcagggattcacagagccggatgggggtgtccggggggcataaggcaaccagtattgatcagttagcagggaaggattttgagatttcagaagccagcacagccttatcaatatgttccagctgcatgaatttgctccccgaaaaagctcgccaaaaacatcctaacccccaagggatccccggtacagccgcaccgccccccgatcaccaccacccaggcatactcactcccattctttcctcctggcctggggggtgctgtggattttgtgggcctggtgggccaagatgacatctcggtgatccaccacgccgccccgccgcctcagaggggggccctcgaagcagatgctgagccggggaggccgagtgtcctgcagggcgctgggcgtgccccgagctgcggttgtgcagggcgtcatagtaactggggcgcgagagcatggagtcggggacccaggaagacttcaacatccacgggcctcgctcagaaatcccagggtcttctccctccagcacagtgagggggaaactagaagaagaaagaggagacagagagggccagtgtgagggagaggcagacagagctcacagagggcaaggagaagggaactcagaagacaaggagaggccgccccaccctccttcgcagaaagtcaaaatacaccccagcccaggctggccgggatttagtagttccttggcaactcagggcccagaaagccagttcttaggagctgcccggcaacatatgtgccccatggagcaaaacactatgaggctgtgccgcgggcactcgctccacctcccaggtgccggccacagagggcgggatgctggatttctcagcatctctatgtctccttctgcaaaatgagccaccatgggcctgggggttggctctccctcagtcccttggtcctgtgagctctggaaagctgaaagggtgagttcaagaggcagttttaaacgcacgtggaaggctgggtgcagtggctcccccaggtaatcctagcactttgggaggcagaggtagccagatcacctgaggtgaggggttcgagaccagcctggccaacatggtgaagccctgtctctactaaaaatacaaaaatttagccgagcatgatggcccatgcctgtaatccacatgcctgtaatcccagctgctcaggaggctgaggcaggagaatcgcttgaacccaggaggcagaggttgcagtgagccgaggtcccaccactgcactccagcctgggtgacagtgagactctgtctccaaaaaataaataaataaataaataaatccacatgtgagtggccacctgtccagccacactgcttctcaccaggttctctgtttttttaacttcatttttatttttttttagagatggggtcttgctatattgcccaggctggtctggaactgctgggctctagcaatcctcctgcctcagcctccctcttgagtagctggaatgacaggtgcacgccaccacaccaggttacggctctttggtttgtttgtttgtttgtttgtttgagatggagtcttactctgttgcccaggctggagttgtggtgtgatcttggctcactgcaacctccacctcccgggttcaagcaatgctcctgagtagctgggactacaggcgtgcgccaccacgcccagctaacttttgaatttttagtagagacggggtttcaccatgtttcatgtttcaccatgttggccaagctggtcttgaactcctgatctcaagtgaccggcccgcctctgcctcccaaagtgctgggattacaggcatgagccaccgtgcctggccaacagctggtttttggaaagagaaaagagacagggtttcctccactcacacatttatcaggtggacactcaacacaccaaaggaccttgaagccccaagatttttatctccaatcacttaatcattcaacaaactctgagcgaccacccaatttgtgcctggccctgtgctaggtcctggggacgcagccatgaataagactggcaaatgtccccaccctcatggagaaggcattctaggagggagacagacaaggaacaaaataagtgggtacattatatagagattaggagttgaaaagtgctgggaagggccaaaggaccaggtgtggtggctcatgcctgtaatcctagcactttggcggtcagattgcctgagcctaggagtttgaggccagcctgggcaacatagtgagaccccatctctactaaaaatacaaaaattagccaggcatggtggtgcatgcctgtagttctaactacttgggaggctgaggtgggaggatcacttgagactgggaggcagaggttgcagtgagccaagattgtgccactgcactctagcctgggtgacaaagccagaccatgtctcaaaaaaaaaaagtttttaaattgacaaataaaaattgtatatatatatataggccaggcgtggtggctcacgcctgtaatcccagcactttgggaggccggggcgggcggatcacaaggtcaggagattgagactatctggctaacacggtgaaaccctgtctctactaaaaatacaaaaaaatagctgggcgtggtggcgggcgcctgtagtcccagctactcgggaggctgaggcaggagaatggcatgaacctgggaggcagagtttgcagtgagccgagatcacaccactgcactccagcctgggagacagagggagactccatctcaaaaaaaaaaaaaaaagattgtatatatatatatgcacacacacatgcacatacatacacacatacacacacacacatatatatatattttttttgagacaaagtttcactcttgttgcccaggctggagtgcagtggcatgatctcagctcactgcaccctctgcctcttagtttcaagcaactctcccgcctcagcctcccatatacctgggattacaaaattgtacatatttatgatgtctaacatgatgttctcgaacacgtatgcattgtggaatggcaaccttgagctaattaacatgcattacctcacacacttactgaggtctttttgtggctaatctcttcttataagaacacgagtaatattgaattagggctactcatctgacctccttttaccttaattacctttgtaaaggtcctgtctccatatacagccccattctgagatactggagtttagacttcaacatatgaatttgggaagacaccattcagtccttaacaaagaagggtaaggtgtgtaggctggctgcctacaccagctcatgcctgtaatcccagcacttgggaggccaaggcaggaggatcacttgaggccaggaattcaagaccagcctgggcaacataacaagaccctgcctctacaaataatgttttaaaaatcagccaggcatggtggcacgtgcctgtagtcccagctactcaggaggctgaggcaggaggattgtctgagcctgagatgttgaggttgcagtgagccgtgattgtcccactgaactcctgcctgagcaatggagtgagaccctgtgtgaaagaagaagaagaagaagaagaagaagaagaagaagaagaagaagaagaagaagaagaagaagaagaagaagaggaggaggaggaggaggaggaagaagagggagaagaagaagagttgggtagactggtgactttattttatttatttatttatttatttatttatttatttatttatttatttttgagacggagtctcactctgtcatccaggctggagtgcagtggtgtgatcttggctcactgcaagctccacctcccgggttcacgccattctcctgcctcagcctcccaagtagctgggactacaggcgcccgccactacgcccggctaatttttttgtatttttaatagagaaggggtttcactgagttagccaggatggtctcgatctcctgacctcgtgatccgcccgcctcggcctcccaaagtgctgggattacaggcgtgagccaccgcacccggcccgactggtgacttcattaaataggggtgcagagacagcctcactgaggaggtgacatctgagagaggcctgagggaggtgaggagccacatgggtatctgagagaagagctttccaggcagaaggaacagcacatgcaagggtcttgaggcaggactgtgtgtctcaaggaacaaagaagaggcccgtgtggctgtgggtgacgtggtccgtggcttttggaatctacacctcacccaaaagcatatttccagtcccagactgatttttcccacctgagtcagcccctacaactagcctctcagtgtctgtccaagaaaagcgtatctgctgggaggctggcatgaatgaaatagaattaggccatgcacagtggctcatgtctgtaatcacaacagtttgggaggccgagggaggaggattgcttcagcccggaagtttgagaccagcctgagcaacatagcaagaccctgtctctaaaaacaaaaacaacaaaaataaactttgtttaaagaaattagccaggtggcatgtacctgtagtcctagacactcgaaaggcatagatgggaggaaaccttgagcccaggagttcgaggctgcggtgaattattattgcaccactgcattccagcctgggctacagatagcctaccttgttagaaagaaagagaaggaaggaacgaaggaaggaaggaaggaaggaaggaaagagaggaaagaagaaagaaagagagagagagagaaagaaagagagaagggagagaaagaagagaggatggaaagaaaagagagagaaagagaggagagaaagaaaacagagaaagaaagagagaaagagaaagacaaagaggccgggcgcagtggctcatgcctgtaatcccagaactttgggaggccgaggcaggaggatcacctgaggtcaggagttcaagaccagcctggccaaaatggtgaaaccccgtctctactaaaaatacaaaaattagccgggcatggtggcgggcacttgtaatcccagctactcgggaggctgaggcacgagaatcacttgaacccaggaggcagaggttgcagtgagccgagatcgtgccattgcactccagtttgggtgacagagtgagactccatcaagaaagaaagagagagagagagagagtgagagagaaggaaagaaagaaaaaagaaagaaagagagaaagaaaggaaggaaggaaggaagagaagggaaggaggaaggggaaggggaagggaagggagaccctgtctcaaaaggagagagaaagaaagaaagcaagaaagaaagaccccgtcaaaaaggaaggaaggaaggagaaagaagagagagaaagagaagaaagaaagaagagaaagaaatgagagagaaaaaaaagagaacggagagaaagaagagaaagaaagacaggagaatgaaaaaaacagagagaaagagaaagaaaagaaaggagtgagaaggagaaaaagaaaaggaaaagagagaaagaaaagagaagaggaagaagagagagaaaaagaaaagagaggagagaggaagagaaagaaagagaaaaagagagaagaaagaaagaagagagacaaagaaagaagagaaaaagaaagaagagagaaagaaaagagaaaaaggaagaaaggagaaagaaaagaaagaaaggagaaagaaaagagaggagcgagaaagagaaagaaaggagagagaaaaaggaaaaagaaagaaaacaaattaagaagctcaaccctatacagaaacatttcacaagtcacttcaacacccacaggtataagtaggtggtgcacagaatgaggctgcccccagattgcaaagaaccaattgaaggaaggaaggagggaagaattatctccattccatttcctctcaccctgctttaagcatgcaaagaaatgagaactctcccagcctctcctaagcagatcaactcactatcagcttagcaaatgcagttaccttccggtttctttcgaaatcctataactaatggagtttaatagatctatccttcatgacgcttttaagcttcaatttactccagtgaaacctcactcttaattgcccacgattgtgcatttatagtcttttgtgttttgccaaatactttcccattgtgctgaaaaagaaatctgctttccttttataaccacttctgcacggatgccattcttcttcccatttcacagaaataaaactgaaaacaagaggtagattcaagtgtgttccagctacaaggttttatttcacccctccccaaaaatattcttcctgcacatatatttttttttctttttctttttcttttttttttaagaggcagggtcttgctctgtcgcccagattggagcacagtggcaccatcataactcacagcacccttgaagtcctgggctcaagtgatcctccgaagtagctgggaccacaggcccgtgccaccacagcaggctaatttttaaaatttttaaatttttcttagagataggatctccctatgtggcccaggctggtctcaaactccttgcctcaagtgatcctcctgtctcagtctctcaaagctccgggatgataagtgtaagccaccgcgcccggccacaacgatattaaagaaagaaaaaatcggctgggtgcagtggctcacgcctgttatccagcactttgggaggccgaggcaggtgggtcacttgaggtcagcggtttgagaccaatctgaccaacctggtgaaaccctatctctactaaaaatacaaaaattagccgggtgtggtggtacacatccgtagtcccagctacgtgggaggctgagtcaggagaatcgcttgaacctgggaggcgaggttgcagtgggtggagattgtgccactgcacttcagcctgggtgacaaaaaaaaagagaaagaatccagtttacaggttgggtgagctgtgtagtacctacacattaactaaaatcccagaaaccagacacagtgcaagaactttgacggcaaaaattctgaacaagccaggctctgtggctctcacttgtggtcccagctactaaggaggctgagacgggaggatcagcccaggaggtcgaggttgtagtgagcaatgatcacgctactgtactccagcctgggtgacagagtaaggctctatctctgaagattaattaattaattaagttctgaaagcagaaggagtgtttctacctgggaaagtaggaagcagatcaggaagtcaaaacctaaagctaatatcccaggtgacatctttggagacgtgcacctgcttatcccacagcctgacatgggatgctcaatttccctctctggtgctatagcacatagctcccatcctcccccatcccattacaggcttccaaattcaccctgatacccaagccagaaattgagttgtcaatcctggcttctcgcttcccttaactccaggcatcaaatccatccgcaggtaccatctactcacctccaaaatatatcctgagggctggacgtgggggctcatgcctataatctcaacactttgggaggctaaggcaggagcaccttttaagcccaggagctcaactgaacaacatagcgaacaacacagtgagaccctgtctgcaaaaaagaatttttttaaatcagccaaacgtggtggcatgcaatggcaacagtaatcccagctactcagaaggctgaggcaggaggatcacctgagctcaggaagttgagactgcagtgagctgtgatcatgccactgcactccagcctggataacaaagtgaaaccctatctcaaaaataaaaataagccaggcatggtggctcatgcctgtaatcccaacactttgggaggccaaggcgggaggatcacttgaggtcaggagtttgagaccaccctggacaacatgatgaaaccccgtctctaataaaaatacaaaaattagccaggtgtgatggtgggcaccataatttcagctactcaggaggctgaggcaggagaatcactttcacctgggaggaggaggttgcagtgagccaagattgtatcatggcaccccagcctgggtgacagagtgagactctgtctcaaaaaaataaaaataaaaacaaggctggtgcggtggctcacgcctgtaatcccagcactttgggaggccgaggcgggcagatcacctgaggtcaggagttcaaaaccagcctgaccaacatggagaaaccccatctgcactaaaaatacaaaattagctgggcatggtggcacatgcctgtaatcccagctacttggaaggctgaggcaggagaatcgcttgaacccaggaggcgcaggttttggtgagccgagatcacgccattgccctccagcctgggcaacaagagaaaaactccatctcaataaataaataaatacatacatacatacatacatacatacatacatacatacatacatacaaaatatatcctgaatccaaccacttcctgcactgcatggctgccaccctcaatcatttggactggggctgccttcttccctactcccactcccaatccattccctcctctgcagtcagtgcagtctttctaaaatgtcaatcaggccaggtacagtggctcacatctgtaatcctagcactttggtaggcccaggtgggcagatcacctgaggtcaggggttcaagaccagcctggccaacatggcagaaccctgtctctactaaaaacacaaaaattagccgggcttggtggcacttgcctgtaatcccagcgagaggctgaggcagaattgcttgaacccaggaggcagaggttgcagtgagctgagatcacgccactacactccagcctgagcaacagagtgagactccatctcaaaaaataataataataaaaaataaaaataaaaaatgtcaatcagcacatttgcttttgctggaataaaagccgcatcctcccaggctgcctcatccctgtgactttgtcccctccccttctccctgttgcacttttagccccagaatcactggccttgtccctgtttctgggctgtgtcaagctcattccaccttcgcacctgctgttccctcttcctggaatgcttttcccctagtctcggacaagccagcttcctgtcgtcatgcaaggctgtgatcagatgccaacttgcagaaccatccacccaaagcaccacccccagcaggcgttctcatcacgctcgcctgtgaggtcttccttaaggtgtttgttgctccctgagaccagtacgtacatgcgggcttctataacatccacctccctgataggatctcagctgaatttgaacaaggatcttggcctgtctcatttgccattgagtctccaataccttcactatttcttgcctgaatgaatgaataaatgaatgaatgaatattcttaggaatgagtctacccaggaaaatgtcattaagccccttccaaaccaccaccaggggtctgtgacttttcaattttatgtatttattttttaatattattattattattatgattttgagacagagtctcactctgtcgtccaggctgcagtgcagtggtgtgatctcggctcactgcaacctctgcctcctggattcaagtgattctcctacctctgcctcctgagtagctgggattacaggtgcccaccaccatgcccagctaatttttgtacttttagtacagacggggtttcgccatgttggccagactggtctcgatctcctgacctcaggtgatcctcccacctcagcttcccaaagtgctgggattacaggcatgagccaccgtgccctgctgttttattattatttttgagatggggtctcactctgttacccaggctggagtacagaggcatgatcctacctcagtgcagcctcgaactcctgggctcaatcgatcatcccacctcagcctctcgagtagctgggaccacaggtgcacaccactatgcccagctaattattttattttattttttgagagacagggtctcgctatgttgcccaggctgatctctaattcttggcctcaaatggtcctcccgcctcagcctcccaaagtgctgggattacaggtgtgagccactgtgcccagcctgggatgtttttctaagcagggaagggataaagtatgcgggaaataaggcatattctggaggaaggtctaacctcttcacacaacaatgaaccgtggggtcccaggaaaattgcctaagcctctgagtctctgctttctcctccacaacgtggggatcatggcaagtacttcagaaagccgttgtcatgaagggttatcaggctcctccatgagaagtcaatgcaacgaacacagcgctgggccacagaaagtgctaggtccacacctagtctagtgttaacctggggcaggtgggcagagtggggcatctgcaggaaagggggacagccactccagctacatcaccaaggacgctttgcagagcactcgtgagcagttccaacggagccccagctgtcctgtgtgtacacacgagaaacaaacacatttccagccaggggtcgctccctccccagccaggtgcctgcgcctggcacctgcgggggccccatgaccaaatgtgctgtcctctctctctctctctctctgtttgcccaacctcagcacggaggaagtggcaaagtacgtgggcttggcttcactgagaatcagcagggttccaccaacagacagcaccaaagagaagacaatagaaaaagtaaacagaagaaaataaacaacacgaagcctgaggccacagaaagcctcattgttaatggaataacaatcacagcacctgcctgatacgccaggtatcggtggtccccaccactttcccacacctgaaacaggagctgagccctccgctgccaagcctggactggcctgaattgccatggcaaccggatggcacctggagatgctcctgattcacacagcctggtccaggagctctaggggaagagacagagagggagggaccacagggaagtctgggggtgctttctgtgaccctcctacatggacagaaacatttacatgtttctgtgacagacaccaggcttcgccacccacaaatgaaagaagtggtcacaactggtaaaaatgagtaaaagatacaccacatatatatatatatattttttttttttttttttttttttgagacagagtctcactctgttgcccaggctggagtgcagtgactcactgcaacctccgcccatccaggtttaagcaattctctgcctcagcctccggagtagctgggattacaggcacatgccaccatgcccggctaatttttttgtatttttagtggagacggggtttcaccatcttggccaggctggtcttgaactcctgacctcatgatccacccacctcggcctcccaaagtgccgggattacaggcgtgagccaccgtgcccggccccttaatttttaaaagtagaggaaaaacattctctgaaactttgcgggttcatcatacacattggaaaagcatgtgatgctggagccaggcatcatggtgtgtgcctgtagtcctagctactcgggaggctgaggccagaggaccacttgagcccaggaggtcaaggctgcagtgagctatgattgcaccactgcgcttttgctggggtgacagagtgagaccctgactcttaaaaaaaagaaaaaaaaggaagaggaaagatgctccttggaaggagatgggagctcaggaagccccaatatgtcctttgtctaaagaattcaatatagagccagggaggggctggactgtaatcttacaagctcttcttttattctctggtgtgggaaaatgtctttttccacccatcttggaggaaaatttaaaaactaaaaatgagaggccaaggtgggagaatcacttgagccggggaagttgaggctgcagtgagctgtgatctcacctctgcactccagcctgggtgacagagcaaggccctgtctcttaaaataaagtacaagagatggacttgaaacactgttgctggctgtgagatgaaggaggccacgagccagggaatgcaggccacccctggaagctgagaatgaccccctgctgacagcaagcaaggaaacaggactccagtcctacacagcatgaaactggattctgccaacaacttaaatgaacaagaaaacagattcttccctagagcctctggaaggaagcacagccaagcaacactttgatttcagcccagccaggcctgttggctttctgacctatagaaactgtgagataataagtgagtggtttgttttgttttgttttgttttgttttgttttgttttgttttgtttgagatggaatctcactctgtcgtccaggctggagtgcagtggtgcaatctcagctcactacaacctccacttcctgagttcaagcaattctcatgccttagcctccagagtagctggaagtacaggcacctgccaccatgccctgttaatttttgtatttttagtagacacggggtttcaccacgctggccaggccagtcttgaactcctgacgtcaggtgatccgcccaccttggcctcccaaagtgctgggattacaggtgtgagccaccacccccggcccactgagtgtggttaaggcatttatttggtggtaatttggtatggcagcaatagaaaaattaataggcagttacatacatgtagaataattttttacaaacatggaatttgtgagattatatatgtgtatatacatacatacatatatattaaaagtctacaacttttttatacttagtaatatgtcttagataacattccacatcagttcctataggaatgtttcttacaaatattccacatcagttcctgtagtttatttttatgttgttttgagatggggtcttgctacgtcacccaggctggggtacagtggcacgatcatagctcactgcagcctcaacctcctagggctcaagcaatcctcctgcctcagcctcccaagtagctgagattacaggcacacaccaccatacccagctttcgatagtatttttcaatgactccatcaaatttatctggtctggacctctgggtctttctgatttcttgctattccccagaatgttgcagccaacgtcctgcattgtagatcttcaggttctgctacaaatatctctgcagaataaatccccagaggtggaattgctctgtcaaagagtgtaagactgggcgaggtggctcacacctgtaatcccagcacttcgtggggtttgccttcgagtggaatatacgcaggtgtggagtcctggttgagagcacagaagtgttcctttaaaagcagcttaaacactttgggaggccgaggcaggcagatcacttgggaccaggatttcaagaccagcctggccaacatggtgaaactctgtctctactaaaaatacaaaatacaaaaattagccaggtgtggtggcgggcacctataatcccagctacccgagaggccgaagcacaagaatcgcttgagcctgggaggcagagtttacagtgagtcgagattgtgcccctgcattgcagcctgggcaacagaataagactgtcttaaaaaaatttttttaataaatatatttttaaaaagcagcttaaaaacaacatctatgtttgaaatcacatctcctcccctcctctctcttgttctctctctctctcgctctctctctggccttgatcctctttctttcacttgtcatttgatcctgtctttctctgtgtgctaagagctccatcaataaaacaccttaatccagccctggacaaaactagggttgctaagacccaggggcatgatcttccctcccaagttctaggctagagagtgtgaaattcagcagaccgtggattctaacagctactaaggaggcgctgggatgaagatcatctaaatgtcatttgtaatcgaccttcagatgcatttgtcaccttccggatgatgttttatttggctgatagtaaaagcggtttccaggccctgaacaaacactctccatggtaggcagccaggtgtggagcaactgctaaggatcttcctagaattgaaaactcagaaccagggaacaacccaaatgtgcgtcgatggcaggatggataaacaaagagatgtggcacggtggctcacgtctgcaatcccagcacgttgggagaccgaggtgggtggatcacctgaggtcaggcgttcgagaccagcctagccaacatggtgaaactccatctctactaaaaatacaaaaattagctgggcatggttgtgcatgcctgtaaccccagctactcgggaggctgaggcaggagaatgacttgaacctgggaggcggaggttgcagtgagccaagatcgcaccattgctctccagcctgggggacaagagcgagacttcatctcaaaaaaaaaaaaaaaaaaaaaaaaaaaaaaaaaaaaaaaagatgtgggtggtgcacacgcacaatgagaagttattcaggcttagagagggaggaaattctggccgggcgtggtggttcatgcctgtgatcccagcatgttgggagaccaaggcggacagatcacttgaggtcaggagttcgagaccagcctggccaacgtggtgaaaccccgtctctactaaaaatacaaaaattagtcaggcgtggtggcgcgtagcctgtaatctcagctactcaggaggctgagccaggagaattgcttgaacccagcaggcagaggttgcagtgagctgagatcatgccattgcatgccagcctgggtgacggagtgagactctgtctcaaaaaaaaaaattaataaatgaatacaggtatcaatacgtggatataggcaccaataagtgggtataagcaccaataagtgaatagaggcatgaatcaatagatgtaggcatggccaggcgtggtagcttatacctgtaatcccagcactttaggaggctgagggaggcagattgcctgagctcaggagtttgagaccagctcaggcaatatggtggaaccccatctctactaaaaatgcaaacaaaaaaagttagccaagcatggtggcacacacctgtagtgccagctacttgggagactgaggcaggagaatcacttgaacccaggaggtggaggctgcagtgagcagggatcaaaccactgcacacagcgagactgtgtctcaaaaacaaaaaaagatgtagaccccaataagtagatatagacaccaataagtggatataggcaccaataaatggacataggcaccaataagtagatataaacaccaataagtaggcataagcatcaataagtagctacagacaccaataagtggatataggcatcagtaaatagatacaggcatcaataagtagatataggcacattaagtgaatataggcaccaacgagtggttatagacatcaataagtagctgcagacaccaataagaggatataaacatcaataaatggatataggcaccaatacatggatataggaaccaataagtagacataggtaccaataagtagatataggcctcaataaataaacataggcaccagtaactagatataggcatgaataagtggatacaggcctcaataagtaggcataagcgtcaataagtaggcataagtgtcaataagtagccacaggcacctataagtagatataggcatcaataagtggatataggcatcaataagtagatataggcaacaataagtggatataggcatcaataagtggatataggcatcaataagtgaatatagacatcaataagtagatataggcatcaataagtggatataggcaccaataagtagatatagccctcaataaatagacataggcaccagtaactagatataggcaggaataagtggatatagggctcaataagtaggcataagcatcaataagtagccgcaggtgccaataagtagatataggcatcaataagtagatgtaggcatcagtaactgaatataggcaccaataggtgggtataggtatcaataagtagctacaggcccaataagaggatatagacatcaataaatggatataggcaccaataagtggatataggcatcaacaggtagatataggcatcaataaatggatataggcaccaacaagtagagatagcatcaatagttagatatgggcatatacaagggtgtttatgctccttctggccacaaccagaagcttccccatctcgggcagggtggaccccctcccccctatctttgcatagacaagcaaccagcaagatgaaagaaaaagtaaagctggggccaagaagagctctcatcacttggggcaaaactccagaactgccccacatacgtgagaacaaagctaaataaaacgccaggccagatggccaaggttgaacgcaagctgagaccagcaagccagcatagccccaagtgtggctgcaagtgttcatcccctggtgagaataaaccatgtcacagctggtctcgtgttccacccacttttttcttcaccagctggacggtgtgatcatggtgcggtgagataaacacgcaccctcccacagagatgaacagatcacccgggattgctggatggttgggcagccccaggacactgagtgaggctgcaggacgggggaaggaggggaggagacccccaggggtacaggctgttgggctgaatctcaggctaaattcttcctcccaacttcacttcgtggctctgttatcctccccatcactcatgcatccattcatcattcattcattcatccagcaatatttattgagcacctactgtattccaggcactgttctcaacactgaggactaagacatgaataacacagacaaaagtccctcctggagctggcgttctaataaaggagatgaacaagaaacaggaaaagctcctgaaatagacagaatgtcagatagagaaaagaaaacggtagaggaggagggggaaggggaagctgactgtcatttaggtaaagtggccagaatggcctcactgagaaagaaatatttgagtaaagacctgaagggagatgaggatgagggaggatgcatgagggtgtctgtgggaagagcattccaaggcagaggaaaaggcccttgcaaaggcgctatggctggccgtgtggctgatgtgttcaaggaacggcacagaggccagtgtggctggagcagagtgagtgagggggccagaaggtgagggcagggaggtaacggggccaggaggtaagggcagggagataaggggaacagatggtacagggtcttgtgggccatagggagaactttggcttttgctctgcatgaggtgggagctatgaaaggatctaaggagatgagggatgtggcctgactcaggtattcatgggagccctctggaggtcacatttgcaagaaaccccaaatgcagtggaatcaatcaccccagacattgtggggttccttccttctctctttccttcacttccacattctactcatcatcagagctgatgactccgccttgtccttcccctcccacttgccgtaggccacattcattcctctctgaatctcgtctcctccaagtcatcataaacaatcagttcatccattagccagtcccctaaagactccccacagccagctgaataaagtgtgagtcctggccaggcgcggtggctcatgcctgtaatcccagcactttgggaggccaaggcaggtggatcatttgaggtcaagagttcgagaccagcctgaccaacatggtgaaaccccatctctactaaaaatacaaaattagctgggtgtggtggcagacacctgtaatcccagctacttgggaggctgaggcaggagaatcacttgaacccgggaggcggaggttgcagtgagctgagattgcactactgcactccagcctgggcaacaagagtgaaactccatctcaaaaaacaaaaacaaacaaacaaaaaaagccaacaacaacaacaaaaaaaagcaatcagttcatccattagccaatcccgtagagactctttccacaaccagctgaataaagtgtgagtcctttcgccagccccatatatgtgccacgatgtagccccagaattccttccatcctcacttctcactacatgaagctgatgctctgagacaatcctgaccacacctctgactttcaccaccctgaatacctttccctctcctcatccccaaggtccagctcaaaatacatttctgcttcacaagcctcttctagaaaatcctaccagtgcccacacctcctgtctgcccatggctccctgcccctagcacctgccgctcccgacctggggctcctctggccgcaggagtgaagcccatctgcaggggacaggtcacaggtgctacccctggaatattcctcaaccaatggctgctgccaggagttggtagagaaatatccccatctttgcaaccagactgcttgggcttggattcaggatcagctgcctcctgctatgtgaccttgggtaaatcgctccacctctctgggccagtttcctcatctgtaaaatggggataataaaaacacatccttcacagtgtcattgtgaggatgaaataacttaattctatgcagcatgcccaggacagtgtcccacacatggtaagccccaatatgagtgtttgctactgttattactgtgtttacaatgatagtttcattctctgttgaatcctcaaagcctagcacagtgcctggccaacaggaagaactcaataaataattgctgaaaggcagattgccaggtgcggtggctcacctctgtaatcccagcaatttgggaggctgaagccagaggattgcttgaggccaggagtttaagaccagcctgggcgacatagggagaccccctatctcaacaacaacaacaaaataataaattagccaggtgcagtggtacacacctgtagtcccagctacgagggagaccgaagtagaaggttcacttgagccctggaggttgaggctgcagtgagctatgatcaagccattgcattccagcctgggtgacagagccagacaaagaaagacagagacagagagagagagagagagagagagagaaggaaggagggaagaagaaagaaagatggaagaaagagagagaaggaggagggaaggatgaaagaaagaaataaaaagaaaggaaagaaggaaggaaggaaggaaaggagggagggaggaaggagaagggagggagggaaggaagggagggagggagggagggacggaaggaaggaaggaaggaaggaaggaaggaaggaaagaaggaaggaaggaaggtaggaaggtaggaaggaaaggagggagggaggaaggagaagggagggaggaaggagaagggagggagggagggaagggagggagggaaggaagggagggagggagggacggaagaaaggaaggaaggaaggaaggaaggaaggaaggaagggaaggaagggaaggaagggaaggaaggaaggaagaaggtggatcaattattcctcttgtccaagcaaggcaaaaccagtggcatcaggtcaatactgaaactgaaccaaatacctggacacttagcaccatgtgtcatcccctgtccaccttctctctctctctctctctctctctctctgtctctctcacaaacttgcttgacttcatcagcattggagaactaaaaggaaacagtacagagtaccaggaaaaaaataaaactcctcccacagggactgtatttctctaatgtttctcccacaaactaaaccatgcatctgttctcttaagtcattcttgggcaggagtgggtgggtaatgttgcttttattctatctccttgaatttttttcctgattaggtattcttgactcctcaatattgagcaactggtaggtgtttcaccatgtccctcatttatcctgcctctttggccagacagtgtctgtgtgtgtcatcaacatattaacatgttaaagcaataattcattatggaggtcattttctggctttttttttttttagatacagggtcttgctctgttgcccaggctggggtgcagtgacacaatcagaactccctgcaacctctaactcctgggctcaagcgatcctcccacctcagcctcccgagagctgggaccacagacattggccaccatgcctggctaattttaaaattttttatagaaacgagatcttgctctgttgcccaggctagttttaaactcccaaactcaagcaatcctcccaccttggcctcccaaagctctgggattacaggcgtgagccaccgtgcccagccctcagtggtcattttgaattctgatatgctttgtttgttcaacaaatatttattaactaccaactgtgtaccactgtgatccaattatcattcatcttgggatcttaagactctagagaaatcacctaaaaactgcctcccggccaggcaccataactcacgcctataatcccaatactttgggaggccaaggcaggcggatcacctgaggtcaggagtccgagaccagcctggccaacatgatgaaaccctgtctctaccaaaaatataaaaaatgagctgggtgtggtggcatgcacctgtactcagctactcaggaggctgaggcaggagaatcacttgaattcaggaggtggaggttgcagtgagccgagttcacgccactgtactccagcctgggcaacagagcgagactccgtctcaaaaacaaaacaaaacctgcctccccttggggggtcaaaagaaaatgtagtgttggttttgctggagagaaaaataactgtacaccaaaagttgtagtccctttggggaaaaaaagtgagtagcccttgagttgagtcctgaaaaaagatgtttgaagatggtgtctgcctaccatcttcaagattttggtgttggtagctaagaattaatgtatgagttagtagggtccatactaactagtagggttctgttactcatgtctgaccaggacgatttcatggagggtaagacaagtggtacaggaagaagaaagaaatgtgaactaaaaaagaaatcagagaccgggcatggtggctcacgcctgtaatcccagtactttgggaggctgaggcgggtggattgcttgagcccaggagttcaagaccagcctgggcaacacggcaaaacctcatctctacaaaaatacataaaaaattagctgagtgtggtggcgcacgcctgtggtaccagctactcgagaggctgatgtgggaggatcacctgagccctggaggttgaggttatagtgagccgagatcgggctactgcactccagcctgggcgttgagtgagaccctgtctcaatcaatcagtcaatcaatcaaatagttaaaatggtatgctctatgtgtttttttaccataatttaaaaagaaattggctgggtgtgttagctcacacctgtaatccaagcactttgggaggccgaggtgggtggatcacccgaggtcaggagttcaagaccagcctggccaagatggtgaaaccccgtctctgctaaaaatacaaaaattagccaggcatggtggcgggtgcctgtaatcccagctacttggaaagttgaggcagaagaatggcttgaacctaggagacggaggttgcagtaagtcaagattgcaccactgcactccggcctaggtgacagaataagactctgtctcaaaaataaataaataaaaaataaaaataaatcaaacacatgctctggagagtaatttgaaagtagccaacatttagtgagcacgtactaggtgcctgccactgggtatcacctgtggctgggcttctcagcaatgctaagacacagacgccatcgtcatccttgcagtcagcagggggcactgaggcacagagggctgagtggctcccctgggtcacacgccaatgagtatgtggcctccagggcttctcagatgctgactggctcatgactcacccagcctcaagttcaaatgcagattctaactcagcagggctgagtggagcctgggactggccaagacctgcactttgaggggaggatttcttccccggaggctaagtcagtcctccctcgtccactggacaaacttggcctataagggggtggaaaatgcttacccagagcgttcgtctgtctgtcactgtggagacagctagggttgaaggatcctggaatagaagctccctcatttgccctgggcccagagggccctctggtcctatgccctaacattttaaataataataataataaatgaaaccctctgccagagcttttgatgtccacgagttttacaggtcatttgctcagtaatttcactcagtgtcaaatccaccctctccctcctgacccctgtaatgatcttctgttttctttttggggaggctgcattgaattgaacccatcttatgtggagggaaagtggcatttgcaccgagtgacttttttttttttttttgagacggagtctcgctctgtcgccccagctggagtgtgatggcatgatctcggctcactgccacctccgcctcccgggttcaagcaattctcctgcctcagtctcctgagtaactgggactacatgcgcctgccaccacgcccggcaaatgttttgcatttttagtagagatggggtttcaccatgttagccaggatggtctcggtctcctgacctcaagtgatccgtccacctcggcctcccaaactgctgggattacaggcatgagtcactgcgcccggccaccgagtgacatcttgatacatctcctgagatctctgtgtcttggaggaaaatggagtatccacacagggataaactcagcctcttagacttctgtagttggggagacttcctgcagcctggtattggggtgttgaggatggactaggggtcacatgggtaaggggaggtctgtgtcagctgtaagcacctgagatccctgcaagcaactgaaggctatccctgaaagagcaggtgcaggacacggcaaggctgccctagagtcactgtctctgaacaggacaggagccctgagccagggatacctagagaatattcctccacagcacctagggctttgaggagaaggaggagagagagaagcttccctcttgttggttcagcctctgggaaggtgctctgacctcctgttgacattctaaattggctccttctcctgggtcagtctctcaggagcctctaaggaaggagcctggagcaatcaacatgatccccatgccctgccgtccccagcagcgtctgttgtacgaagctgttagcttcaaaggaaggagaggggagaagaggaattctgctgccagtttttcccacttattgagaaacaaaagccacccagacaactcggttcaaaattaaagaaaaaaggcggaaggggcaaggggggaatggcttagagggggtgtccagctctttctctgcttttccttcaagtggggcaagagagggaagaatattaaatattaaaaggaagaagtggtttcctaagacgatgtaattattcccaacagcctaaactccatctgccatttatctctcttttcccaacacattcacgccgcgtcgatcacagcaaacaaggcccaggcacacaggcgtcgggaacttttgttcggggtccccaaagccatgggcaattggggggtggggagcggtgaggggatatttcataattctaaatgttgtcacttgttcaaagcagcacgagacttaaaatgtggacttgaatgagggggggtggggaagatataaaaaagtagaatttgacttaggtcagaaattctcattcttgggaaaacgtcacatgttcagggcagatggcaaagacatcggttgctgggaggggggttgccaagggcaattgaatgaaaatggatttttaagaaagaaacaggaatacgctggaaatgaagagtctgccccccttcttcccagcaagagaaactgttcagaaaagggaagaggttcttaaggcagaagcaagtgaaatctggaaataagctgcccgcccgcaaagaaaaactcttcatagagggagcaggggaagatctttgtatttctacctttgcagatggaggtaatttgcagcaaggaaagaaagattaaactccctgcaggactttgcctccagcgtcccccgctctcagaagccccactcacctgtatcgcatcagcgctggggctcaggcgacgcggctagtggtcagcactgcgagtcctccaggggtcccgagggtcccatctcgtcagcacccaggggtccgagctatctgaagtccatgcatccatggcccacccagtggaaagaagaagggtggcccagagacaggagggagaaaagtgggtgccaagaagagcagttttctgagcagagggctccccacaaaagcagacactgaacggggttgctgtatcagctgccaagggaaaaaaaaaaagaggaggaggaggtttccctgatgctgggaggagggaaaggaggaccgatcgttctcagctgctgatcatctttagctaagtgctacacggggacccagcctggggagatcaatccaggcaaggcagaagctgagaacaagccaggccactgctcctcagggggaaaaataattcacgatttcttgctctcttctctatgccccttaacaccgcactgggacctcccagcacagggcaaaactgttgtctcaaaaaggagactttttccccccgttcgggcttcccttaaagagcagaggaacggtggtaagaagagtattctctctcttccactggttcctgtcgggggtccggggagggggcgtgtagaataggcatcaggcagcagggatatggaatcgtgttataatttaaccatctccactccgccacattgcaacctaaattatttatgctcttagaaaaatgataattagaggacagctgctagcctcctctctgagtctgtcgtgttcattctggaaacagcttcccagtaccctgatctcctcccttaggcagaggggttgtattattaaagaagaaaggcaggaaaaggaaagttgagtcctttcatgcaaaacaccaatccattacaacttggtaagtttgtttgcaatctgtgtagacttatgctctcaaaactagggtaatcccatgtctcttttcaaaggggcctcctgttaaagataggggttttgtttttcctataagaagcatcaagaggccggtgcggtggctcatgcccgtaatcccaacactttgggaggccaaggcgggtggatcacctgaggtcaggagtttgagaccagcttggccaacatggcaaaaccctgtctctactaaaaatacaaaaattagccaggtgcctgtaatcccagctactcaggaggctgaggcaggagaatcgcttgaacctgggaggcggaggctgcagttagctgagattgtgccattgcactccaacctgggcaacaagagagaaactctgtctcatttaaaaaaaaaaaaaaaaaaagaagaagcagcagcagcatcaagggcacagagaatctccgtatttttcccaaggctgagccaaaatggggagaatctacctcattaagaacaaagcagcatttagacaggtggggaaaatcgaacctgactgggtgtcaggggattttaaagaattcatgtgagttttgtaaggactgttggtggtatttggttatggtgttctttaaaagtgtttgtctgttagagatgcatatggaagtatttatggataaggtgatatgatacctggatttgcttttttaaaaactccaggaaacagcaccacataaataaaatatggcatagctatgcaatggaatattattcagccatgaaacggaatgaagcactgatccgtgctgcaacgtggatgaaccccaaaaacatgatgttgagtgaaagaaggcagacacaaaagaccacatggtgtaggattccatttatgcaaattgtccagagtaggcagatccatagagatggaaatcaggtgagtgattggcaggggcaggtggagagggaatgtggagtgattgctgtcagggatggggtttcctttcggggtcatgaaaatgttctggaactagataaaggtgatggttttcacaacatcgtgaatgtgctatggaattgcattttattttattatttatttatttacttatttatttatttttgagacagagtcttgctctgtcgcccaggctggagtgcagtggggcaatcttagctcaatgcaacctccgcctcctgggttcaagcaattctcctgcctcagcctcccgagtagctgggattacaggcgccctcccccatgcccggctaatttttgtatttttagtagagacgaggtttcaccatgttggccaggctggtctcaagctcctgacctcaagtaattgcctgcctcggcctcccaaaatactgggattacaagagtgagccaccgcacctggccagaatagcattttaaaatagttaagtttatgttatgtgaatttcacctctacttaaaaaaaaaatcccaccagaaaagaagggaaaagatacacccgaagagcagaaaactgctaattggccacgcacgagggtggctcatgcctgtaatcccagcactttgggaggctgaggcaagagaatcgcttgagcccaggagttagagactagccttggcaacatggcaaaaacctgtctctacaaaaaaatacaaaaatgcgtgcctgagttcccagctacctgagaggttgaggtgggagaatcacctgagcctgggaagttgaggctgcggtgagctatgatcatgccattgcactccagcctgggcgacagagcaagaccttgtggaagggaagggaaaggaaggggaaagggaagggggaagggaaaggggaaggggaagggaagggggaaagaatgggaagggaagggaggggagaggaggggagggaaggggggaggggaggggagggaagggaagggaacaagaaaataatatttgcttctaaaactgttatggtttggctgtttgtccccggtaaaattcatgttgaaattgaatccccaatatggcagtactgggaggtgggaagcggggagggaggggaggggaggggaagggagggaattgctaattggagaagctgggtgatagggccttggggatttgctgtatttttttcattgtattctctctacttctctactttgtgtatatttgaaattttgtttctgtttttgagacaagatctcattctgatgcccaggatggagtgcagtggtacaatcatggctcactgcagcccaaacctcctgggctcaagcaatcctcccgcctcagccttctgagtggctggtactataggctcacgacaccatgtccagctaatttttttgattttttgtagagatggggtctcgctatattgcccaggctagtaattttctatatttgttttgtttccttttcttttcttttttgtttttattttattttattttattgaaattttctattttaaagagacgtctgggaagtgtggattaagaagaatgcagcccatgtcagtgggtttagaccaacagacaattttggctggacacagtggctcacggctgtaatcccagcactttgagaggccgaggtgggtggatcacctgaggtcaggagtttgagaccagcctgaccaacatggtgaaacccggtctctactaaatacaaaaaactagccgggcatggtggtgcatgcctgtaatcccagctacttgggaagctgaagcaagagaatcacttgaacccaggaagcagaggttgcagtgagccaagattgcaccactgcgctccagcctgggcaagaagagcgaaactccatctcaaaaaaaaaaaaaaaaaaaaaaaaaccagattgggggatttctatgtgggtgagtccagcccgtagttcagcagctggggagccactaggatgggaagcaactcaaagcaaagctggtgggattttccccaggccaggaggcctccaggtccgtcacctacactggagtgtagagaagaagccagccctggggtccctcggcctggagaacaaaaggactcaatccaccctgccagcctgggaccctgcccaagcttcatctccacatcagtaaaaccaggctaatccttcatacctggtggggattttgtgagcattaaatgagatcgtgttaaaaaggaacaacaagaaaataatatttgcttctaaaactgttatggtttggctgtttgtccctgctaaaattcatgttgaaattgaatccccagtatggcagtactgggaggtgggacctttacaaggtgactgggtcatgacagccctcatgaatggactgattcatttatggattaatgaattaatgggctaatggattaaggggttgttatggaagtgggactggtggccttatgaaaagagaaagatgagccgggggcagtgactcatgcttgtaatcccagcacttttgaaagccaaggcaggaggattgcttgaggacagaagtttgagaccagcctgggcaacatagtgagacccctgtctctatttttaaaaggagaggagaggggaggggagaagaggggaggggagaggaggagagggaaggggaaaaggaagagagacctgaagcttgagaccagcctgggcaacatagtgagacccctgtgtctattttaaaaagaaagagaggaaaggagaggagaggagaggagaagaggaagagaaacctgagcttgcacactcagctcctcaccatgccatcccctgcaccgacttgggactctgcagaatccccaccaacaaggagctcctcctcagatttggcctcttgaccttgaacttctcagcctccgtaactggaagaaattaactccttttctttataaattacccagtttcaggtatactttttttttaaatgagacagagtcttgctctgtcacccaagctggagtgcagtggcgcgatcatggctcactgcagcctcaacatctctggctcaagtgatcctcccacttcagcctcccgagtagccgggactacaggcgtgcgccactctgcccagctgattttttaaatgttttatagagatagggttttgccgtgttgcccaggctggtctcaaactcctaggctcaagcagtcctcccaccttggcctcccaaagtgctgggattacaggagtcaaccaccatgcccagcccagtttcaggtattctgttataagcaacagaaagagggctaagacaaaaaccatctctgaaagacacatgaaaatcaatcataggggtccgcttttctctgcttatttttttatatttagggaattttaaaccatgtgagtacgatatggattatatgagttaatgcatatgttaaatagcttgatttagccattgtataatgtatgtatatatatcaaaacatccataagtatatatacaatttttacttgttgatttaaaaatttatttaattaaaacgtgagatcatgcatgtcaagagacatcatactttttttcttttttttttttttggtaaaaggccagataataaaaatcctaggcttggccaggtccgttggctcatgcgtgtaatcccagcactttcggaggccaaggcaggtggattccctgaggtcaggagtttgagaccagcctggccaacatggtgaaaccctgtctttactaaaactacaaaaaattagccaggcatggtggtgcgcgcctggaatcccagctattctggaggctgagacaggagaatcggttgaacctgggaggcggaggttgcagtgagccgagatcacgctgctatactccagcctgggtgacagggtgagactctgtctcaaaaaaaaaaaaaaaaaaaaaaggagaaatttgttcctagtataacataagacgtggttattaaagtgcctcgtgaactcaaaaatgctatgtcacataagctgtcattattatgcagggagtcataagtctatgcaattagcattgaattttcctgtttttaaatcacatgacttgtatgagtcacttcgtgatcaacataaatagtcatcctggtttccttagaagtcctttgaaaatgtcaaaaagttctacttttcctcttacgcaaatgagaccatcctgagtcaaccatcttttaaactcttgtgttttttgccagagttggtgaccatgaatagattgaatgattggccctgatgagtcactctctcctgtgtgcctatctttgcgatggtctcatcatgggtggtgggtacttctccatggcttggccttaggcttggccacgtgacttgcttcagtcaatggtaggtgggcagaaatggcaaggagtgagttccaaaccaggattcagaagccacatgtgtttctgcctgccctcttgcacctctgctcccaccacggaaacaactgtcccaggaggaagaggagggacacgtggagcagaggagtcacccagctgagccccagccagatcagccaaacccagctggtacacatgtgcatggggaataaatgactattgctttaagccactaagttttggggtcatgtatgatgcagctgtgatggttaatttggggtcagcttgactgggttaagagatacccagatagctagttacaccttatttctggatgtgtctgtgtttttagaagagattcgtgtttgaatctgtagactgagtaaagaagattcagcctcctcgatgcagtgagtatcttccaatccactgagggcaaggatagaacaaaaaagcagaagaaggggagatatctccatttcgtgcctcagcctcctgagtagctggaattacaggctagggccaccatgcccggctcgttattttttgtatttttagtagaggcggggttttaccatgttcgttcatgcctataatcccagcacttgggaggtcaggagctagagaccagcctggccaacacggtgaaaccccatctctaataaaagcacaaaaaattagccaagtgcggtggcacacgcctgtaatccagctacttgggaggctgaggctggagaattgcttgaacccgggaggcagaggttgcagtgagctgagattgccccactgcactccagcctaggtgacagagggagaccctgtctaaaaaaaaaaaaaaaaaaaaaaaaaaaaaaaggaacttctgtccagtagccaaagtctgggcaccttctctatgattccaattggtttttcaactctgccttcaaaaaaaaaaaaaaaaaaaaaaaaaaaaaaaaaggccaggcacagtggctcatgcctgtaatcccagcactttgggaggccaaggtgggtggatcacgaggtcaggagatggagaccatcctgggtaacatggtgaaaccccgtctctactaaaaatacaaaaaattagccgggtgtggtggcacacacctgtaatccagctactcggaaggccgaggtaggagaatcacttgaacccaggaggcagaggttttagtgagccgagtttgcgccactgcactccaggtgggctacagagcgagactctgtctcaaaaaaaaaaaaaaaaaaaaaaaaaagccaggcgcggtggcttacgcctgtaatcccagcactttgggaggctgaggcgggcggatcacgagatcgggagattgagaccatcctggctaacacagtgaaaccccgtctctactaaaaactacaaaaaattagccgggtgtggtggtgggcacctgtagtcccagctacttgggaggctgaggcaggagaatggtgtgagcccggaaggcggagcttgcagtgagccaagatcatgccactgcactctagcctgggcaacagagcaagactccatctcaaaaaaaagaaagaaaagaaaagaaagaaaagatgctggaagcaaaaccatttagaaagcaatgtcatgtgttgatccagttagaaaactgggagggccttggtcagccagtccaggaacgaggcagagaatactacctcacttacctccaagggcccatgcaaaaaacagagggcacattcaaactgggtaatctgagaagcatttaataaaatatatttacagcaaaggctggatcggttggataatgcaacagcaactacaggaagctgttaccacccacacctgaaggggtgaagaagagaaggttctaggctccacagacacagggagaattgtgcagaaaaggcagcctgaaagagggacgcacacaacccatagcaacctgaaacagaggaagccaaggaaataaatttaaattcccttaactggccgggcgcggtggctcatgcctataatcccaacactttgggagatcgaggtgtgtggatctctttaggtcaggagcttgagaccagcctggccaccatggtgaaactctgtctctacaaaaaatacaaaaattatccgggtgtggtgtcaggtgcctgtaatcccagctactcgggaagctgaggcagggagaatcacttgaacccaggaggtggaggttgcggtgagctgagatcacgccactgcactccagtctggttgacaaagtgagacgactacgtctcaaataaataaataaataaataaataataaataaataagataaattccctcaacctcacccttctcccacttttttttttttttctgctctgtcacccaggctggagtgcagtgacaggatcatagctcactgcagcctcgacctcctgggctcaagtaatcctcctgcctcagcctcccaagtaactggcactacaagtatgtgccaccatactcagctaattcttccttccttcctccctccctcccttccctctctctctccttccttcctttttttttttttctctttcttttctttttctttctttggagagatggagtctccctatgctgcccaggctggtcacaaattcccggcctcaagcaatgctccccgctcagcctcccaaagtgctgggattacaggcatgagccatcgcaccttctctcacttttcatctgtgagtaactcccattggctgagccaaccaaaagccagtgggcaacagagcccaatgatgttgtcttttggggtcagcctcaggaacagaagagggtagaaggtgaggaagagtagagctggaaggaaaaatggactttacccactttctcttaaccagttctcagctgacaaagcatcttcagcactttctgcatccctgcaattcaggtcatctttctcagcagcctgcttggctgatctgattcctttttccttctctggctaccaaaggaaacagatacaaaagggaaaattgattttccagggaagcctccagtaagcctcaaggacaatcccatttatgcatttatgttcctcgtgacatctggttttgagccagtcccgctgtgggtggagtgctgttactatactgtttatgttctgatcgtatttctcttggcccagagagcaggcagctggccaaacatataatgccctccatgggggcagaggtctctctctgagcccaacagctgagccccgcacacagagcgctactgggaaatttgacaccatctaccatcagcagaatgaatgcctttgccattggcccaggcaagaaaatcgttgcttgcatatcctgggcaaagtctagttatgcattaacagtgacagaaggacaattaggatgcaggaaaccaagaaataatatgtgagataaagtgtacactctccttgcctgtgtgagccaattgtttaaactgcaagaagacacacaggctctgaaatcgaatccttctgtgctcagaccccaactttatcacttcctggtgccatggtctctcttcctttccttccttccttccttctttccttccttccttcctctctgtctctctctctcttttccttccttccttcctctgtctctctcttttccttccttcttttcttccttcctctgtctctcttttccttctttctttccttctttccttccttccttcctctctttctctcttttccttccttccttcctctgtctctctctcttttccttcctccattccttctttccttccttccttcctctctctttttccttccttcttctgtctcttttccttccttctttccttccttcctctctctcttttccttccttccttcctctgtctctctctcttctccttccttccttcttctgtctctctcttttccttccttccttccttcgcgcgcgcgcgtgtgtgtgtgtgtgtgtgtccactgcctatgttcaaaattctcctccttctatgaggataccagtcatattggattagggattgccagggtttgaatgcatgtgtgcacccaaattgaaatgttggaccctaagacccatgcaatagtgttaagcagtggggcctttagaggtgattaagtccggaggactctgcccctctgaatgggattagtaccttaaaaaagggcctgagggaactagctagggcctttggcccatctgttctttttttttttttttttttttttttttttttttttttttgagacggagtctccctctgttgccaggctagagtgctgtggcgtgatcttggctcacggcaacctccaactctctggttcaagggattctcctgtctccacctcccgagtagctgggattacaggcatgcgccaccatgcttggctaatttttgtatttttagtagagatggggtgtcactatgttggtcaggatcgtctcgatatcctgacctcgtgatccgcccgcctcggcctcccaaagtgctgggattacaggcgtgagccaccatgcccggctgcccatctgttctttaaaaaaaaaaaacaaaacaaaactttttttgagacagggtattgctatgttgtccgggctggtcttgaactcctgggctcaagtgatcctcctgcctctgcctcccaaagtgctggcattaaaggcacgagccaccatgcctggctgcccttttgttcttctgccacgtaaaaacacaacaacaagataccatctcgaaggcggaggacaagccctcaccagacactgaatctgctggtgccttgatcttggacttcccagcctctaggaccataagcaataaatatctgttgtttacaaattacccattctctggtattttgttatagcagcaggaacgaactaagactaggcccaccccagtgacctcatcttaatgaattatgtctctaatgacccaagttccaaataaagtcacattctagggtactagaagttaggacttcaacttatgaacttttttttaagacacgaggcctggctctgtcacccaggctggagtgcagtggcgcagtcatagctcactgcagcctcaaactcctgaactcaagcagtcctcccacctcagcctcccgagtagctgggattacaggtgtgtgctaccatgcccagctcaacttatgagctttcaaagacataattcaacccataatggtaacttaatctgagtctcagtctccctgtaaaacaggctaagaaccttgaatggacaaataatcttgatgaaatgattatgaaaaagggaggcatttaaaacagtttctggcacagagtgggtcctgaaaaaaccgtccggctaggaaaagatgtgctaaagacttccagggggagtccaggggtgtaggaaacacggagaaaagcctgcagataaatcagtgagtgacactaggtatcatgtaacactgtcgtcaattttgctaagatataaattacaagccaggcacagtaactcatgccagtaatcccagcactttgggaggccaaggcaggcgaatcacctgaggtcaggagttcaagaccagcctggccaacacggcaaaaccccatttctaccaaaaatacaaaaattagccaggagtagtggtgctatcctgtaatcccagctactcaggaggctgaggcaggagaatcacttgaacccaggaggcagaggttgcagtgagctgagatcacatgaccgcactccagcctgggcaacacagcaagactccatctcaaaaaaaaaaaaaaagatataaattagtacaataaaatgtacctgagctggctgcagtggcttacatctgtaatcccaaggactcaggaggctgaggcaggaggactgcttaagcccagaagttgaagactgcaggaagctgcaatcctgccactgcactccagcctgggtgacagagtaagaccctgtctcttaaaaaatgtttgagcacggtggctcatgcctgtaatcccagaactttgggaagctgaggcaggtggattacttgaagtcaggagatcgagaccagcctggccaacatggtgaaaccctgtctctactaaaaatacaaaaattagccggccatggtggtgtgcacctgtaatcccagctatttgggaggctgaggcacgagaatcacttgaacccgggaggcggagagtgcagtgagctgagattgtgccactgcactccagcctgggtgatagagggaggctctgtctcaaaaaaaaaaaagtgcacccatcttcagtgtacagtttgcaggttttgactaatgtgtacaacacataaccgccaaagatttagaacatttccatcactcccaaaatgcccccatgcccctttgtggccaatgcctccattcccgtcccccaggcgaccactgatctgtctgtcactttagattcaacttgcctattctataattgtatagaaacagaatcacaccaggggcagtggtccatgcctgtaatctcagcactttgggaggcccaggcagtaggattgcttgagctcaggggttcaagtccagcctgaacaacatagtgagacattgtctctaccaaaaatccaaaaaaattagctgcgggtggtggtatgcacctgtagtcccagctactcgagatgctgaggagagaggataacttgagcacaggagattaaggctgcagtgagttatgatcgcaccactgcactctagcctgggtgacagagaaagaccctctctccaaagaaaaagaaaagaaatgggccgagcatggtggctcacacctgtcatcccagcactttgggaggccaaggcgggtggatcacaagttcaggagttcaagaccagcctggccaacatggggaaaccccgtctctactaaaaatacaaaaattagccaggcatggtggcgggcgcctgtagtcccagcttctcgggagactgaggcaggagaatcacttgaacctgggaggcggaggttgcagtgagccaagatcatgccgctgcactctagcctgggtgacagagcgagaccttgtctcaaaaaaaaaaaaaaaagaaagaaaataaaaaaaaaaaaaaagaaaaagaaatggaatcatacaatcatacagtctgtcctcttttgtgattggctcctttcactccacacttgtgagatgcatccttctgatcttttcatcagaatctgttcctttctattatactccagtgtatgggtggaccactgtttgtcctctctcttgtgaatgggcatatggtttgtttctagtatttggctaacatgaataaagctgctatgaacatccatgtataaaagtctttgtcggggccaggctcagtggctcacgcctataatcccagcactttgggaggccaaggtgggaagatcacctgaggtcaggagttcaagaccagccaggccaacatggtgaaaccccgtctctacaaaaaatacaaaaatgagccaggcatggtgatgcatgcctgtaatctcagctactcaggaggctgaggtgggagaatcagttgaacctgggaggtggaggttgcagtgtgctgaaattgcaccactgcactccagcctgggcaacagagcgaggctctgtctcaaaaaacaaacaaacaaaaatgtctttgtggggatcctgggtaaataccagagagcggaattgttgagtcacctggtgagtgtccatttaaccccataagaagctaccagactgtcatccaccaacagtgtgtgcatcactctacatcctggccagcacttggtatcacccgtctttttgattataactattctagtggatgtgtggtgacatctgcctggggttttaatttgcatttccctaatgtctaatgatgtcgtatgcatgctcatgcatgagtaagctttaaagacacgaagggaaagcccgggggtcagagaagacattgctgagagtcaggaggtgggaatgcaagatggcactgcagaggtttttagggtgtgggagtgagggggtggatggaagggcatactgggcataccacagggtgggagatgaggccttaggtctttgcaagatggtgagtaggaattgaggctccctgtataaagtagggatcctggtaggaccacacctagggacagggtaccaggaagactctccaccagcccaaggtgagcacaggggagctcatcttttttgctttttttttttttttttttttgagacagggtcttgctctgtcaccaggctggagtgcagtggtgcaatctgggctcactgcaacctctgactcccgggttcaagtgattctcctgcctcagcctcccgagtaactgggactacaggcatgtgccaccacgcctggctcatttttttgtattttagtagagatggggtttcaccatgttggccaggatggtctcaaactccagacttcgtaatccacctgcctcagtctcccaaagtgctgggattacaggcgtgcaccactgcgcccggccatctcttttctgaacattgaaaacacatacatataggtaataaccagtgtgctctaggatgtgggaaacagacattaatttacactgttgggccgggtgcagtggctcatgcctataatcccaacactttgagaggccaaggcaggcagatcacttgagcccagcagttcaagaccagcctgggcaacatggcaaaaccccatttcggcctggtgtggtggctcactcctgtaatcccagcattttgggaggtcgaggcaggtggatcacttgaggtcaggagtccgagaccagcctgagcaacatggtgaaaccctgcctctgctaaaaatacaaaaattagccgggaagctaaggcaggagaatcgcttgaacctgagaggcagatgttgcagtgagccaagatcgtgccactgcactccagcctgagcgacagagtgagactctgtctcaaaaaaaaaaaaaaaaaaaaaatctctgccaaaaatacaaaaattagccaagtgtggtgggacgtgcctgtagtcacagctacttgagaggctgagttaggtgggaggatcatttgagcctggaaggttgaggctgcagtgacctatgattgcaccactgcactccagcctgggtgatggagcaagaccctgcctaaaaaaaaccccaaaatttactctgtttactctcagctcactgcagctcagacctctccaggcttaggtgatcctctcacctcagcttcctgagtagctgagaccacaggcgcgcaccaccacacccgactaatttttgtatttttttgtagagacatggatcctgctatgttgcccaggctgttctcaaattcctgggctaaagtgatctacccgactcagtctcccaaagtgctggcattacaggcatgagccaccatgcctggcctcttgcttacgtctactttggacttgctctcagattcttttgtgtggcgaagtgtaaaacctggactggctcagcagcaacaattggattttagacgagtagacactccaaaagatgttcactacaataaccattatctcagcacttcatttctaaccttaactctaacctagagagacaattgcacaaatgttcagaacagcctgtatcagttacctaatgccatggtaatgctgcgtaacaaatggatgtgaaaacgtcagtgacatgcaacattaagtttattgctcatatatctggggcaccctcactaatggggtggaaaggaggtgatcaaaacatccagccagaacatctgcttctcttcctcctccttccctttcccttcttcctttatcaactctagcatttactgaacaattcttatgttctggacactgctcaaaaagcttcacaggtaataagtaagttcattttcaccaggagataagtgtcactaacatatccactttgcaaatgagaaaactgagtcagaaagaagttaaataactggcctgaaagcccatagctagtgaggggtagactcaaagagtccttgcttctaaaccctaagtccagagggcaacaacctttttatataaaggaccagaaaataaatattttaggcttcatgggccatgtggatttggcccatgggccatagtttgctgacccttgccttaatccaacagcctaagaaccttcaaagtaaagctgaccagagctttacctttccacgagatttccaacaaacccctaaatccagtaaattagaagaagggtgtaattcaccatgaatgaattaggctgattgctgcataattcatgattatcaaaatgatgttttaatgtcagtcatcttcttaagatattttttaagacttctaggcactgtcctattgcaggagaaaaatgtttttatacctttttttttttttttttgagacagtgtctccctctgtcacccaggctggagtgcagtggcacaatcacagttcactgcagcctcaacctcccaagctcatgcaatcctccctcctcagcctccctagtagctgggactacaggagtgtgccactgtgcctggctaattttttatttattttttgtagagatggggtctcactactttgctcaggcaggtcttgtacgcctgggctaaagtgatacccctgccttggcctcccaaagtgctgggattagaggcatgagccaccacacctggccacaggaaaaaattctgcttcagtggaaaattagacactgtctagagcagggattggcaaaccacagcccagaaaccaaatccaaccactcctatttgtttatattttttacagctgttttcatgcttcaatggaagtggagtagttgccatgtagaccatatgtctagcaaagcctaagatatttactacctggccctttacagaaaaagcctggcaacccatagggtaaagaacactcttctgagttatctgattctagcctttcctttcctttgacctattttactattctgcaagttcttgataattgatagcaatgcaaaataatcctttttttgtagacaagaaaaagctgtaatgtccaccagaagttcaacctacttccctccaccactacggaagagttcaatttgcacagtcatttcagtgtttctgatccataactgtgtcttttatttgaatgcgcctttgaatgagttgtaacattggttccgtcattcatgaggaagataaaatctttaacacacattcacttcacatatgtatgaaagtcatgatttttcttctttctttaattattcttgaacattatttatggtttcataagagtttagagagctgctctccaatggacattaaaaaatatctgcatcattctactagatcttgtaatagtagccctgagctataaattttgtaccagaaacttgagaaaaagtttgcctgacttaatggcattttgggaggctgaaaaatcaacttttgagtattaaactggaaatccaaaaccagatgtggtgactcacacctgtaatcccagtgttttgggaggccaaggcaggaggatctcttgaggccaggaattcaagaccagcctgagcaacatagcaagaccccatctctacaaaaacaaattaaaaattagtcagtcatggtggtgtacgcctgtagtcctagctacttgggaggatctcttgagcccagtaattcgaggctgcagtgagtgatgagcgtgcctcttcactctagcctgggtgacagggtcactccctctctctaaaaaataaaataaactggaaatccaagtaactagataatgaggagataaaacataaaacactcttagaagttatgagtatgtgatatggcttgaatgtgtccccacattttatgtatttgaaacttactccccaaatttatatgttaattcaaaacagggctttgggaaggtatttaggatcagataaggtcatcagggttaaacgttcatgatgggactggtggctttataaaaaaaggaagagagacctgagtttacatgcacgctcttgccccctcactacaggatgccctctgccatgttatgacacagcaagaaggccctcaccagatgtcagttcttcagtcttggccttcccagcctccagaactgtaagaaaaacatttttttcttttttttctttcttttttttttctttttggcagcgtcttgctctgttgcccaggctggagtgcaacagcacgatctcaactcactgcagcttccacttcctgagtttaagtgatgctcacatctcagcctcccaagtagctggacttaacaagcatgtgccaacatgtccagctattttttttttttttgtatttttagtagagacaggtttttgccgtgttggccaggctggtctcaaactcctggcctcaagcgattcacctgcctcagcctcccaaagtgctgggattacaggcatgagccactacgcccgacatttattttctttataaactacccagtttgtgatattttcttatagtaatgcaaagtagactaagtatataagtgatcgttgatgccaaaaggatggttgagatcccccagggagtgtggggggaaatatgagaagaggaaaaggcagacaaatggggagggacagggtagaggagcagctgaggacagctaaagttagactggacagagcagcattgtgggctgcaacagcatgggccaaaggagcaccaaggcagatgcatcaacaccatcaagttgtgcataaaggtcaaggaagggctgaaaagtggccattggcttgagcaaataacaggtcattagtggccttggcaagaacaatttgataggaatggtggattgaaaggcaaacaacagtgggtttggagtgaatggagagaaggaagtggaattacagttggctgaataaatgaagaataatgcctgattgctgcagggttgttatgacaaccaaataagataatgatggtgaatactctttatggaattttttattgaggtatcatttatatacagtaaaatccaccctttattagtatacagttctataggtttggacaaacatacacagtcttgtagcctctacaaaaatcaagaaatagtacagttccctcacccatagacagttctcttttgatcctttgtaattaatcccttcctgaagccttagcccatagcaatcattgatctattttctgtccctacagccttgccttctctagaaagtcacataaatcaaagtgtacactacatagacacttgagtctggcttctttcactcagaataatgcacttgatattcacctatcggtattttatttttttaattgctgagtaatattccattgtatgtgaatattccatcacttttttttcataaaagtgaaatgctgtataaaattgtaaggacttattattcttggaaaatatatatacatgcaggcaggaaagtctgccttagtttgggctccctcagaagctgaccttgagacatgattcaagtgaaagttgtttattttagagtcagttccaggagactcagtatgggaagataaagtgacacagggaaggaaaacaacaagcatcaagcaagttaccactgtgggcaactgacgctcaatctactggtgacctctaggagacaacatagaatacagatctcagaattgcccagcagaggagtgagggagctgggatatttatcctccaccttcctaccagtcactgattgacagccactcatggaggacattaaatctctagcatttctggcccaactgtgtagatcataatgtgtaccccaaagaccagagacagtcctcaaacaaatgaatgcaggtgctggccactggaaattaggccagagtgtgctgaccaaggatgaggtaggggaaggccaggtgccgaccattcctcctatagagtggatacataatcagatcataaacgatctccccttaattttcatctctttcttaagctgtaaacatcaagtatttttatagctcttcaagatgcactgcatggagaccttctaaatcatctctatgtcctctaattgggcttgtcactcacagctaatattgctatatttatagttaatctctccatatagcgtcttatgacttatttttggatttgtgagtcaggcgtgcatactccaatatgcatgctcatgctgctgtttatctatctctacgggaaaacaggatgttgtgttccttttttccctgcctcaccgtacccactcctgacccttgtctgacagcctttggcttatattaattttcataaataccttctgcttacttcatagttttccaaatattcgaaaatactttatttcacttaatctgcaggataacactaggaggcaagcagagacctcttgcctctaatgcattttacacatgagaaaactgaggctcatgtcaattaaaaattaatttaagctatttcatttaagttaaaaattagtttccactgcatcatatgggatgcttctagttgtgaataactaaaatcccaaactgaattaaacattaaagaaaattatcagctcacatgaagaatataataaataaaaagtaggatgtgctttcaaaagaggtttgatgtgttggctcacaagatgactgccaggaggaccttctgcaacttcacgccccttgttcacaaccggagatggatatacactacctccatcctgagattcactctgattggcccagtccatatcacatgaccacctctgagccaatgaaggtagatggggtatgctgattggcctaaactggtcacatggtctacccggaagctaaggcaaaactcacttccctagaaatagatggagtcccaagtgaaaaacagcaagaaagggaaaatattggaagacattcatggaaagtgggttaattaggaatgttgtcatctgtaggttaccaataacctgagtaagagtggcttaaataaataggacttcagttttctcacaaagcgaaaagtatggaggtagatgatagccattttttaaaaagccattctcaggcacgggcagtggcttgtctgtaatcccagcactttgggaggccaaggcgggtggatcacttgagatcaggagttcgaggccagcctggccaacatggtgaaaccctgtctccaccaaaaatacacaaattagccaggcatggtggcgggtgcctgtaatcccagctactcaggaggctgaggcaggagaatcacttgaacccgggaggcagaggttgcagtgagccaagatcatgccactgcactccagcctgggcgacagagccagactgtctcaaaaaaataaataaatgaattaaaaagccattcttctctccttctttcacccaccatcctcactatattgcttttcctccttaaatttaatcacttcatagtctcaaaggtggctgctacagctggaaaggaggagtaagttctagtgttctataccactgtaggatgactatagctaacaattatgtatagtttccaatagctagaaggaggatagtgaccgtcccaacacaaagaaatgataaatatttgaaatgattaatatactgattatccctgatctaatcactatacatcgtatgtatcatgtacaattatttgtcaattaaaaataaaattttaaaaaaaaatttattttatgtttatttttattttttgagacacagtctcactctgtcacccaggctggagtgcagtggtgcgatctcggctcactgcaacctccgcctcccgggttcacgtgatcctcctgcctcagactcctgagtagatgggattacaggtgcacaccaccacacccagctaattttttgtatttttagtagagacagggtttcaccatgttggccagactggtctcgagctcctgacctcaggtgatctgcccgcctcggcctcccaaagtgctgggattacaggcgggctgcctggccaattttgtattatttatttactttttttttttttttttgtatgagacagggtctcactccgtcacctaggctggagtgaagtggcatgatctcagctcactgcagcctcgacctcctcagctcaggtgattctctcacctcaggctcctgagtagctgactaaaagtgcccaccaccaggtctggctaatttttgtaattttttgtagagatgggggtttcgccatgttgaccaagctggtaccgaactcctgggctcaagcaatccgcctgccttggcatcccaaagtgctgggattacgggcctgtgccactgcatcggcctgctcttgccttttaacaaggaataaatctgcatcttcaagagccctccagcagacttctttatcatgggtcaagttctcccaatgtagagtctagtctaaaataagcatcctgatgcaaagggtttattgagaaggtttgttccagaagaaaccatgaagggaataaaggaagcagaacaaggaaagggaagaagacaagacacggagaggaagttccagcctaacccctcccccatagagagctccacagcttaaattccatcttggagactgtcccatggtgtctctcaatcagagaagcagaaccactgtgagtgatctagaacggggaatttattatgggatttgaccttgtgcaatagtgagttagtggagcagactgtggcccttggtctggtactgggtctgcaatcactctaggtcagccagcccatccgtcaggagggaacactagctgtgcacaagagcagggaggagcagaacccacgagggacttgcgtctgtctcgcaccacctgcaacctcaatgtcgtgagtgacctgcaggtgaagctgtcatccttcaccttggagctgcgtgttcacttggcctagttctcagggaagatgaaagagatctggcaagagctggagaagagccaacagctctgcagcaatgtgtgtgtgtgctgccgccatgcctgacacctccaggaagattaaaaactagggtcattgctttacatccatcttccaaatcttgtgcaggttattcttctagccaactctaacccagaactttacagggaagagagaagggagaaatgttcttccagcttagctgaattgacgttatccaaagccaaatgtcccacctggagaaaaaaggagttagctcctggctataggtgcccccagagaagacgcaaatacacaggcattccccagtctctgtgcaggcaaggaggtccccgtgtccaaaggcaaccctgtgatggccacagaggctggacgtcagcagcaaaacacgcagaactggtaaagggatcagaggggatctgggcagggcatgacaatggccgctacatttactctacatctcaatggccagagtcaatgtcacatccctgccctgactcatacaggtcaaggttccagtctaccccagagggtaaccaacccacatccaccacatccaccattagcatgagagccaaggcaaagacaacgtcatgtaatccccttccagtgtcctttccactgttttcagtattgactgttttcagaacataattaatcaagattagatgtctagaaaaccttgtttaaaatgtgttggccgggcacagtggctcatgcctgtaatcccagcactttgggaggccgagacgggcagatcacctgaggttgggagttcgagaccagcctggccaacgtggtgaaaccccgtctctactaaaaacacaaaaattagccaggtgtggtgttgctcacctgtaatctcagctactcaggaggctgaggtgggagaattgcttgaacctgggaggcggaggttgcagtgagccaagatggcaccattgcactccagcttgggcaacaagagtgaaattccgtctcaaaaaaaaaaaatgtccagtaaaccttgtttaaaatgtgttggccgagcacagtggcttatgcctgtaatcccaacactttgagaggccaaggggggcagatcacctgaggtcaggagtttgagaccagcctggccaacatggcaaaaccgtgtctccactaaaaatacaaaagttagccaggtatggtgttgtctgcctgtaatcccagctactcggaaggctaaggtgggaggatcttttgaacacaggaggcagagtttgcagtgagctgagatcatgccactgcactgcagcctgggcaacagagtgagactccatctcaaaaagaaaaaaaaaaaaaaaaaggcgtggtttcctcccatcttcccaaatgaatatctgaagtatttatctctaaatcaactgttcttcaaagtgtattctgtgaacccttaaacctaagacccttttgagaatccatgagatccagtggtgtactgagacctatttctatcagctagaagaaaccaattgttaaaatgttcaggcactggtgcgagccagttgatagcttgaaattggccatggaagaagtatttacaccatggaaattggcatgcagagcttttttccctcccctttccatgagaaaatagttaaacatttaccagcacacctccgtttgtagtaatattaagacctgattttcctttttctctgtgttgtcatttgcactgttggtaccaaaggaatggtggggaaaactgctggtgccttagcaggaatcaatgcagtattacaatattgtactagtaattgtttttttcataccatgcactcacagtgaggaaggaagggaagaaggaatgaaggaaggagggaaggaaggaaggaagggagggagggagggagggagggaaggagggaaggaaggaagggagggagggagggaggggggagggaaggagggaaggaagggagggagggaaggagggggagagagggaaggagggggaggggggaaggaaggagggagggacaacttcacttaaagttgcagtggtccacacctgtagtctcagctactcgaggtgagaggatcccttgaacccaggggttcaaggctgcagcacaccatgattgtgcttgtgaagagccactgcactccagcatgggcaacatggccagaccccctcttaaaaagttttcaattaggctgggtgcggtggctcatgcctgtaatcccagcacttcaggaggccaaggcgggaggatcacttgaggtcaggagttcgagaccagcctgaccaacatggtgaaaccccatctctactaaaaatacaaaaattagctgggcatggtggcaggcgcctgtaatcccagctactcaggaggctgagacaggagaatcgcttgaacctgggaggcagaagttgcagtgagctgagatcgtgccactgcactccagcctggatgacagagcaagactccatctcaaacaaacaaacaaagtacaaggtaaaccaatggattttaatgaaacagaactgattaaaatggattcagatttctcggagcaactgatctttaagaaacttccagtttttgagttttggtgtagtatcaaagagtaattcctgaattttctgaaatattgaaataatttcctcccttcatcaactacatgtatgtagattttcttgagtcttcaaccaaaacaatgtatcacaacagagtgtgtgtagcagctgtgagaataaagcagtcttctattaaaccagacagtaaagaaatttgtaaatatgtaaagcaacgccactcttctcactaaatttttttttaaatataataaaatatattcattgtgttaggctgggcgcggtggctcacgcctgtaatcccactactttgggaggctaaggcaggtggatcacctgagatcaggagttcgagaccagcctggccaacatggtgaaaccccgtctctactaaaatacaaaaaattagccaagcatggtggcacacacctgtggtcccagctactcgggaggaaattcaaggctggagtgcagtggcacgatttcagctcactgcaacctccatcttcccggctcaagcaattctcctgcctcagcctcccgagtagctggaattacaggtgtgtgccaccatgcccagctgatttttgtagttttagtagagacctggttttaccatgttggccaggctggtctcaaactcctgacctcagatgatccgcctgcctcggcctcccaaagtgccgggattagcttggctttttctcttcaaagacctaacaagaacaaagccatattttgacttgtctgtgtatgctacctaggatcattcatacctcaaatccccctcaaacacaatacaaattaatgagttggggctgggcatggtggctcacacctgtaatcctagcactttgggaggccaaggtgggcggatcacttgagatcagaagttcgaaaccagcctggccaatatggtgaaaccctgtctctaccaaaaatatgttttaaaaaattagctgggcatagtagcatgagcctgtaatcccagctactctgaggctgaggcaggataatcgcttgaacccaggaggcagaggttgcagtgagccaagattgcgccactgcactccagcctaggcagcaagagcaaaactccgtctcaaaaaataataatgataataatgagctgaatataaaccacagagtggctttgtcagcaaggcaagttgttaagaactattcagctgttacttgcataattgattattaaaagcaactgaacctatgagaggtgctatcttagccagaacagctggcttggtctctactctttcaaaaatacttaccactggggaagctggaccctgtcatctcactgtaggatgtactgcttgaaattcttgctgggtcaaaataatagctttgctgtgtaaactggacccatgcaagtttcctgttggctaacaccataagccatgaccttcagccaacggttgctaatgtcgggaagttaaaacacagtccaatgagttcaagagatctttgtgtagacccaaaatttcattcatataaactcatgagctcttcttctaggaggaacagaaaggatactaaatgaatttagcctccaaagatctggtttccagttccaagtatcatcaactagcagcaggacagaatcatgtaatttcatcaaaaaaaggggtccctatggttccctgaaactgtagaattcattgaatgtacgattctaggacctgtgacccatatgtattcgtttgctggggcctccatcaccaaataccatagattgggtggcttacacaacaagaatttattttcacacagggttggaggctggaagttcaaaatcaacgtaccagctagattggttccttctcagacctctctccttgaattgcataaataatttgttttgttttggtaagttttaaaacttgacttttttcccttcaagggcctagaaaacacatagacatattgtgacttgtgtgtatgtgtgctagctagaatcattcatactccaaatctctctcacattacagattaatgggttggatgcaaatggtatgtattgaccaacagccccagctgaggtccagttgacagtcagcatcaactaccagacatgggaatgagcaaccttcagatgatttcagcctccagttgttgagtcgcctcaaccttgaatattcccagtagagacccaggcactatgcagcaaaatcaaggcatctttttctgcatccattctgaattcctgacccatagaatctgatagcacataaactggtttctattttatgcccctaacttggggcatggttgggttttgtggtttggggttggggttggtttttgctttgttttgtttcgtttgagatagggtattgctctgtcaaccaggctggagtgcagcggcgtgatcatagctcactgcagcctcaaactcctggcgcaagcaatcctcccacctcagcctcctgagtagctgagaccacaggtgcacaccaccatgcctgcccccaaaaatgttctcatatcattgcccttccctgtatccccacctttggctgtgtaactttgcaatactcttattatgagcaaaacatatggtctcacctcttgactttggatttcgttatacgacttgctttggacaataattttaaaaaccacaaaactgacagtgtgtcatttttgagcctaggtatattagtcagagaaatagaaccagtagtatagtaaagatacacgagacagagacagggagagagccagagggaaagatagatttatcaggaggtattggctcacgtgattatggaggctgagaagtcatacaatctgccatctccaagctggagatccagaaaagtcagtggtgtcattcagtttgactcccaaaggcctgagaaccagtgtagccaatgatataaatcctcgtctagggaccagagaagataagatgatatgtcccagctcaagcaataaagcagtaaaagaggcaaaattctccttcctccatcttttgttctactcaggccctcaacagattggatgatatccacccaactggggatgatggcagcctgctttactgagtacagtgattcaaacgctaatgatacaggagctaaaaagaaattatttaggcagacagtgagggtaagagagtcctcagcagaattacccttttaacaaaaagcagcccccaaataatttcttttctaacaaagagcagcctgaaactttgagctgcaaacatagataagcaagctggaagcttgcacaggtgaatgccagcagctgtgccaatagaaaagggctacctggcatgttcaacatggaggctccatcttcccttttctttgtcaccacatgtgcagtagaaaagcaggcaacatggtgctggccaggtagagaacccatctgcataataaaacattagggtggtgaggccagcttctttgtgcactatgcaaacggcacccgtagtccaatccgggtcttcacatgctatgcaaatggcatacctggtctgaccaatccttcatgccctatgtaaatcagacatcacttcctcaagctcatctattaaacatcctgtactttgccacaaacaggaagccctgcttaggagcccctctctctctgcaggagagagatttttctctttctttcgcctattaaacctctactcttaacctcactccttgtgtgtccacatccttgatttccttggtgtgaagcagtgaaccttgggtattaccccaggcgaataatgccacttcactaatactctcaatcaggccaggcatagtggcccatgcctgtaatctcaacactttgggaggctggggcatgaggatcacttgaaccaaggagtttgagaccagactgggcaacatagcaagaccccatctctacaaaaaataaatacaaattagccaggcatggtagcacacacctgtggtcccagctatttgggagcctgaggtgggaggatcatttgaacccagaaggtcaaggctatagtgagctatgattataccattgcactccagcctgggcaacagagtgagaccctgtctcaaaagaaaacaaaggctaatggtattttttttttaattgagacagaatttctctcttattgcccaggctggagtgcaatggcacgatctcggctcactgcaacctctgcctcctgggttcaagcaattctcccacctcagcctcccgagtagctgggattacaggcatgcacaaccacgcccatctaattttgtatttttagtagagaaggggtttctccatgttggtcaggctggtcttgaattcccgacctcaggtgatccacccgcctcggcctcccaaagtgctggtattataggtgtgagccaccacacccggcaggctaatgctattaatcagaagcattgtcacagacacactcagaaaaaatgtttaatctgggcacccctttgcccagtcgagttgacataaaattaaccatcacactgggactcaagaagccttgaatgtcgccacttgcccctgccatcatcacgaggaggacatgcccagactagcccattggtcctaggaggagaatgagacacatgtggaacaaaactcagctgagatcagacaacacacagaagtaagtgaaaatagatgattgttgttttaagcccctgagttttgggatggtttgttacacagcatttttgtggcaataactaactgatacagcaagtaaggcagtgagcaagtaaggactcacaaacaatgccccaaaatgagggccccagagcaaaagtttttctctgatcttctcctgaccacctgtctctcagtcccatgctcccctgaggctagccatagaaactagaatccctcttccccaaggtgggtcatagaaccacaaccccttttttcccaaagccagccataagacctaaaaatatgactctttttctctgcctttttgtgtaaaaactggccataaagaaattatctgacccaccctgtttgactgtaggtcataagacctccattccagagagggtcttagcccatagccaggatgctgggcagttgagccccaatattggggcttagcctgggagggttcttggcttcagcctggaaaggatacaaggatgagccagaggtgttagtcacttttactgaagcagcagtgcacagcagctgtggaggtattgctccttgtggaacggggccgccccataggcagtgtacccaaagcagcagctcagaggcagtgctgcaggcatatttataacccacttttaattatgtgtaaattaaggggtggattatacaaaaatgtctagaaaagtgatggtaacttccaggtcatcagatcattgctaaggaaagggatggtaacttctaggtgttaccatggcaatggtaagttgacatggctcactagtgggcatgtcttgtggagaggtgcttttgcctcttccctgttttagctagtcttcaatctggtccagtgtccaagtcccacctccagagttgagtcctgccttctaccttacccagaaggaaataatgcttcacagaaaagccaagaagaatctagatagacagaccttgccagatttctccactcggtctattaccattagatcagaccctgtatttccaatcatgtttctgcacagctgtccatactctgtggaacctaagcataaaaacagtttccactgggcgcagtggctcatgcttgtaatcccagcactttgggaggccgagatgggtggatcacaaggtcaggagatcaagaacatcctggctaacacagtgaaaccccatctctactaaaaatacaaaaaaatagccgggcatggtggcgggcacctgtagtcccagctactcgggaggctgaggcaggagaatggtgtgaacccgggaggtggagcttgcagtgagctgagattgcaccactgcactccagcctgggcgacagagcgagactctgtctcaaaaaaaaagaaaaaaagtttccgttgtatctctgggtcttcattctgaaggcatccgtgtcatgtaaaactatgatcaaagaaatgtgtatgccttttctccaattaatctgccttcagtgacttgatttttcagtgaaacttcaaagggtgacagggaaatttctccttggcccctgcagcaggcatgcattgcttctgaacacattccagtggtgataatcgtggactcacatcttgtaaccataataggcccactgcctcatgcacacagcaagtgaatatgccaagacactgggttgcagcacagaaagacgtttaactgtagggcagctgaatgaggagttgggagggtacctcaaatccatctccccaaggagtttggggctagggttttttgtttttttttttttgctttttgttttttggttttttttttttttttgagatggagtcttgctctgtcgcccaggctggagtgcagtggcatgatctcggctcactacatcctccacctccccggttcaagtgatttactgcctcagcctcccgagtagctgggattacaggtgtgccatcatgcctggctaattttcgtatttttagtagagactgggcttcaccatgttggtcaggctggtcttgaactcctgacctcaggtgatccacccacctcagcctcccaaagtgctgggattacgggcgtgagccaccgtgcccggccggggctagggtttttaagggtgttggaggggctgaagtgtggaaatcattcgctggttgaagaatgcaggatgaagtcatgtgactggaagatgaagacactgacgtcttctgctgatcctattcctctgtgggggtcttcaaacgggttggcatcagctgttttgctggaaatcagggtctgattgtttaaggaatcctaaaacaaaagccttatgtttctaacgtcagaaattctatttaaaggaacaatggaagccaggcgtggtggctcacacctgtaatcctagcactttgggaggctgaggcgggtggatcacttgaggtcagttcaagactagcctggccaacatggtgaaaccccgtcactactaaaaatacaaaaattagtcaggtgtggtggcgggtgcctctaatcccagctactcaggaggctgaggcaggagaatcacttgaacccgggaggcagaggttgcagtgagctgagatcgtgccattgcactccagcctgggcaacatgagtgaaactccatctcaaaaaaaaataaaaaaataaaaaataaaataaaaataattaaatgtatgggacatacgtgcaattttgttacatgcatagattacatagcagtgcagtcagagcttttagggtaaccatcacctcaataacatactttgcacccattgatttttcataacccaccaccctcccaccccttctgagtctcccttgcccatcattccactctctaagtccatatgttggcatgatttagctcctgcttatgagtgagaacatgtggtatttgtgtttctatgtctaacttgtttcacttaacataatggcctctggttccatctatgtagctgcaaaagacatgattccattatttttttatcatcgaatagtattctatggtgtatatgtaccacattttcactatccaattatccatggatggacctctaggttgattcttcatctttgctattgtggatagtacttcagtaaacatacaggtgcaggtacccttttaatataatgatttattttcctttgggtagatattcagtagtgagattgctggatcaaattgtagttctatttttagttctttgagaaacctccatactcttttccatatggatctatctagatgcgcctttaattttattatttatttaaaaggaactgtcaatctgaaataagcaacagagagatcaactctctttaagaaagaattttttttttctgagatggagtcttgctctgttgcccaggctagagttcagtggcacgatctcagctcactacaacctctgcctcccaggttcaagtgactctcctgccttagtctcccaagtagctgggactacaggcgtgtgccaccatgtccggctaatttttgtatttttagtagagacggggtttcaccatgttggccaggatggtctcgaactcctgacatcgtgatctacccgtctcagtctcccaaagtgctgggattataggcgtgagccaccgttaccagacaacaaagaatttattcaggaatagcaggggattacaatctgagatccgcatgctatggcccaccgtaggagcatccaaagaggttagggcaggggaaactttcgaaagaaaaaaaagagccaggcgtggtagctcaggccttcaatcgcaatgactagggaggctaaggtgggaggatcacttaagcccaggaggtcgaggctgcagagagctataatcatgccatgtactccagccaaggtgacagaaaccctgtctctttaaaaaaaataaaatttaagtctgggcacggtggctcacacctgtaatcctagcactttgggaggccgggtgggtggatgaataggtcaggagtttgagaccagcctggccaacatggtgaaaccccgtctctactaaaaatacaaaaattagttgggcgtagtagcgcgagcctgtaatcccagctatgcaggaggctgaggcaggagaattgcttgaaccagggagacagaggttgcagtgagccgagatcgtgccattgcactcccgcctgggtgacagagcaagattctgtctcagaaaaaaaaaattaaaaaaataaaaaataataataaatttaatttaatttaatttaattttttaaaaaaagaaaaataggaaaggcccaaatgaactgttttgaaacaaagaccattggttgcaggagcttgttgcgggagtttattagttcattggtggacacggaaacacttgtcactcaggcagctgtccttgcacaagtagcttatctgggccgggcgcagtggctcacgcctgtaatcccagcactttgggaagtcgaggcgggtgggtcacgaggtcaggagttcaagaccagcctagccaatatggtgaaaccccgtctctactaaaaatacaaaaattagccaggcgtggtggcgggcacctgtagtccctgttactcgggagattgaggcaggagaatcgcttgaacccaggaggcagaggttgcagtgagctgaaattgtacctctgccctccagcctgggtgacagagtgagactccatctcaaaaataaataaataaattaattaatttatttatttatttatttatttatttatttataaaagcaagtagcttatctggaatatcacagctctgaaaaattctttggatgtccttagcatgggcatacatgctccagggctgcctcttcatggcctcctgggtccattgtgttaggatttgatgtaagtgactccattttgatgctaataacttctgcaaaaccaccctcagccaatggttctgcaacttgcacattttcacatagtaatatatagtggagatctttccaaaatattacactctacccaggtctatgtctttcttcttaataactgcattagtattgtaatactaacactgtgtcttaatttgttcaaatcaatccccaaatgagggacactttccagttttgggctatttcaaataaggctacagaaaatatcttcaacccggccgggtgtggtggctcacgcctataatcccagcactttgggaggccggggcagatggatcacctgaggtcgggagttcgagaccagcctcaccaacataatgaaaactcgtctctactaaaaagacaaaaattagccaggcatgttggcacacgccggtaatcccagctactcaggaggctgaggcaggaagaccgcttgaacccaggaggtggaggttgcagtgagccaagatcgtgccaatgcactccagcatgggtgacagagcaacactccgtctcaaaaaaaaaaaaaaaaaaaaaagataatatcttcaaccctatatcttggcaaactctctctggagagtaaatacctagcaataagatttccaggccaaagcctattagtagctatctccaatttttctccaggaagattgcattaatttatactaccatgaataatgtaggagcgcatacatttctatatatgctcagggaagtaagtcacaaaaagacaaatgttatattattccatgaggccttagagtagtgaaattcatagagacagaaagtgggatggtggttgccaggggctgggaataagggagggatgcatcaggagtgtttaatggggacagaatttcagtttcgcaaaaataaatgagttgtttcagtttgttgtttgtttgtttctttttttttctttttgagatggagtctcgctctgtcgccaagctggagtgcagtggcgcgatctcagctcactgcaacctccacctcccgagttcgagcaattctcctgcctcagcctcctgagtagctgggactacaggcgccccaccaccatgcccagctgatttttgtatttttagtagagatggggtttcaccatactggccaggctggtctcgaactcctgacctcagatgatccgctcgcctcagcctcccaaagtgctgggattacaggcgtgagctaccacgcccggtgagtcgtttcagttttacaagaagaaaagagctctggagacagatggtgttgatgattgcacaacaatgagaatgtacttaatgccactgaactgtccactttaaaatggagagggtagtaaattttatttatgtgtatttttactatgggtttttttttttttttttttttttctaaatgggtaggccgggcatggtggcttgcacctgtagtctcaggctactcaggaggatgaggccaggagttgaagaccagcctgggcaacacagtgagacactatctttataaatacatttaaaaacaaaaattagccaggcatggtggcttgtgtctgtagtctcagctacttgggaagctgtggcgggaggatcccttgagaccaggggtttgaggctgcagtgagctgtggtcgcaccactgcatctagcctggatgaaagagcaagaccctgtctctaaaaaattattaaacaaaataaaaaactttttttaattgggcaaaaaaggccaggcgcctgtaatcccagcactttgggaggccgaggcaggtggatcacctaaggtcaagagttggagaccagcatggccaacagggtgaaaccccatttctacaaaaatacaaaaattagccagcatggtggcgggtgcctgtaatctcagttactccaggaggctgaggcgggagaatcgcttgaacccgggagacagaggttgcagtgagccaagatcgcgccactgcactccagcctgggcgacagagcaagactccatttcaaaaaataataataataaaataaataaatagggcaaaaaaaaatcaagcatctctaacaactacctctgtagagctctttgctgtaaacacattgctttcttaatgcttcttgggtaatttcagcattgggttagccatttggaaagttattaataggctccatcctaactcttatcaggacaatcatctcctaattctagggcctagttgtcttttctgcctggagagctcccacagcacccacaaggcatcactaagattcacagggttaggtatctttccagcagcagatcaccacagaattttggcatcacacatattaagaaattaaagagcaaaagtgcctagtttagaaaccagtgatccgcacagaaatgcatggttcctctaaaaggcccttaattcagccaggcacagtggctcacacctgtaatcccagcactttgggaggccgaggtgggtggatcacctgaggtcaggagtttgagaccagcctggccaacatagtgaaaccccgtctctattaaaaatacaaaaattagccgggcgtggtggtacgtgcctgttatcctagctactcaggagggtgaggcaggaggatcgcttgaacctgggaagcagaggttgcagtgagccgagatggcgccactgtactccagcctggacaaaagagtgagactgtgtctcaaaaaacaaaaaccataaaaggcccacaattcaaacatctggtgtccatttaggaagccagttggtcatagctgggaaggttttctcccattcgatcgtagggtctctccaagtgcacattccccacaaggacatagccataaagaatacatgagcaaagtaaaagagaatcctgggaaaatctttcgtttttaacaatacttatttcattatggaagtaacatactcatcagttaaaaacttgaagatgggcagggcttggtggctcatgcctgtaatcccagcactttgggaggccgaggcaggtggaacacatgaggtcaggagttcgagaccagcctggccaacagtgaaaccccatctctactaaaaatacaaaaattagccaggtatggtggcacacacctgtagtcccagctactcgggaggctgaggcgggagaatcgcttgaacctggggggcagaggttgcagtgagctgagatgaggccattgccctccaatgtgggcaacagagcgagactccatctcaaaaaaaagaacaacttgaagacgtagacaaataaaatcacccattgtgataaatagatagtttgggggggttttggttttgttgttattgttgtttcagagacagtgtctcactctgtcacccaggctggagtgcaatggtgcaatcttggctcactgcaacccccacctcccgggctcaagcaattgtcccacctcagccccccaagtagctgggattacaggtgcacaccatcatgcctggctaatttttatatttttagtagacatggggttttgccacactgcccaggctggtcttgaactcaagaccgctcaagccatcttcttgactccgcttcccaaaatgctggaattacaggcatgagtgagccactgcgtccggcctagatagtgtttttcaattgtgcagcatccatatttcctttttttcctgaaagcaatggcctgattctcccttggaaaaccacccacccccttgactttaccttcctccttccgtgtggctggacaagactgattgcatctctagctcctggggtaggctttccccttggaagagtcccatcccctgtcctctgagattggttgaagggtaaacgacccacactgagccaatcagatagtgccaggattttgaatgaagctggcaggaaagagatgagctttttccatcggtgtggataaacttgaaaaaactaagcctggaatgatcggggtctatgatgccaccatgaggggagagcctgcctgagaatgaaatctgagtggagaaatacagacagtgtcctgacaatgtccttcagtcatctgaatccaactatgctcgaagctaaatctatccctgaacttttcagcaatgggagcccattgattccactgttgttatttttgttgaaggcaatatgatttctatttctgatctgggcaaccaacccatccatcttccaaacccaaccaaggcatttttctctgaagtctttttttttttttttcctttgcactggtatttgaactttttatgtatttgagaccacagtatttctgtatctatgtatagctatagattatattagttggtctttgcaacaacaattctacataatggactaatctcaaaacttctttttcttctttacaggtctgggagtcagcaggttttgtagcaggttcagatttgccatcagcactaccatgccctgtgatcaaagtcaatggaaaaagaacccaattcaggcaggactaccaatgtattcggttggtggaaaattaattgtggtttttgccattgaaagtaacagcccagactcttcaggagtgaaggtttgggtcaccctgttaccggaaaggggtccctatccagaccccaagagagggctcttggatctcacacaagagaattcagggtgagtccacagagccaagtgaaagcaagtttattaagaaagtgaaggaataggctgggcaaggtggctcacaactgtaatctcagcactctgggagtccaaggtgggtggatcacctgaggtcaggagtttgagaccagcctgaccaacatggagaaaccccatctctactaaaaatacaaaaattagagacaggagtttcactatgttgcccaggctggtcttgaactcctggcctcaagcaatcctcccaccttggcctccaaagccaccatgcccagcctctgaggagctttataatcacacacacacagagatgctccatcctgcatggggctgccctgattcctgttaaaaccactagcctacagatacagtgtttctttttttattttatttatttatttatttttttagatggagtcttactctgtcacccaggctggagtgcagtggcactatctcagctcactgcaacctctaactcccagggttcaagccattctcatgcctcagcctcctgagtagctgggactacaggcgtgcgccaccacacccggcaaatttttgtatttttagtagagatgggatttcgccatgttggccagtctggtctcgaactgctgacctcaagtgatccgcctgcctcggcctcccaaagtgctgggattacaggcatgagccacagcgcccggcccagatacagtgtttctaacagtgtgtctcatcacccttagatatgctgggtggtgggaaggcagagaaggaaggacaaaagccactgcttatttcaattacctacctttcaccacattggtgagggggggattcttgccctagtgttatgcagatggccaaacacatgcctgacatgggacagatgagactgacagccatttattagttatttacactcactgcctggagaaaggagacactgttgaaactgcctttgcaaaattatgactgagacagtcaaagaaatctaactgaatcgactccatcttgcttctaacctccaagctgtccttgttcattccttggcgtaggctggactaactttgggagaaactcagtttatagtttatagtttaaaacaaagatgacagactgggcacggtggctcacgcctgtaatcccagcactttgggaggccgaggcaggcagattacctgaggtcaggagttcgagaccagcctggccaacatggcgaaaccccgtctctactaaaaattaaaaaaaaaagaaaattagctgggcgtggtggcgggtgcatgtagtcccagctactcaggaggctgaggcagaacaattgcttgaacccgggaggtggaggttgcagtgagctgagattgcgccactgcactccagcctggcaacagagcaagactctgtctcaaaaaaataaataaaataaaataaactctgctccctcactgcactccagcctgggtaacagagggagactccatctctgaaaaaagagaaaaaaacaaaaaactctgctttttgaatatttggggagactgattttagtcataataaaactctggtctcccgcacggccagctctgtgtgaattactctttctctattgcaattcccctgtcttgataaatcagacagcagggaactgaaaccctctgctcagagataaacaggaactgtacctggtccatttaataaagagagctgcttggctttggggtaggggtggtaacttctccatcagggcagagtagggaggggactttgggatcagtcatttgaagccctcctggtttcaccagctgtcaaggcagcacataacattgagccttaattttaggctttgcaccacgtcgcttctgggcattattttttagcaagtgttatggggtgacagaaaggaaagataaaatattctcccagagggacgttattcataatcgctgtgagttgtacagaaatcagtatacggtgtctttttttttttttttttcttgtccaaggaaactaaactccaaacgaagtgaaataaagttggagagaactttaacctcgctgccatggaaaccacatttctcactcatggggcaaagagggtttatgtgaggatctcctgagtcgataaggtatctggacattggcaattccagatatttgattaacaagcaggaaatcgtaaggatttcctaagattgactagccgaggaagggaagcttgggataaaagaagtgcttctttcaggagaggcatttcctaccccttcattctaaaccagggctcctggccgggcccagtggctcacgcctgtaatcccagcactctgggaggccgagacaggtggaccacctgaggtcaggagttcaagaccagcctggccaacatggcaaaaccccatctctactaaaaatacaaaaaattagccaggcatggtggtgggtgcctgtgatttcagctacttgggaggctgaggccggagaatcacttgaacccaggaagcagaggttgcagcgtgccgagatcgcgccattgcactccagcctgggtgacagagcgagactccatctcaaaaaacgaagaaacaaacaaacaaaaaaagattctcataaggatcacgcatcctagatccctcgcatgtgcagttcacaataggattcgtgctcctgtgagaatctaatgctgccactgatctgacaggaggcggggctcaggcggtgatgcgagcaatggggagcagccgtaaatacagatgaagcttcgctcattcggctgcccctcacctcctgctgtgtggcccggtttctaacaggccactgttaccggtccatggcctggggattgggaacccctggtgtacgggtggcagtgaccacctctcagccacagggtgaccccacggaatttgtgctgttttcctctaaacacaacaattagaactccccaggggaaacgttcttgggtaatgccctgaaccccagtaagggccttggcctccaggtcccccgcctcacacttcccccatcttctggttgatcttgcacatcccaaatggctcccctcttcctattgccctgcaaggcactctgtcctcctctctctgggatttgtgagtaataaaactgtttctgttatctgttatttcatgtgttttgttgagttaccttttttttttttttttttttttttttttgagactgagtctcactccatcacccaggctggagtgcagtggtgcgatctcagctcactgcaacctccgcctcctgggttcaagcgattctcgtgcctcagcctcccgagtagctgggattacaggtgcacaccacgacacctggggggcaagatcattcgagaagctttacatcttgtaggactggccctgactccaggagggtttccttctgccagtttagttatgcagcaggaggtgcttggcgtatctccccagtgcagtcttccctatgtcatctgagccccaaagcaatgtgccctgggcctttagtctctcaaagtcttaggaaagtagctttctcttcatctctatgtagtctccaaaccagttcaaatatgctgctgggttactcaggaggctgaggcaggagaatcgcttgaacccaggaggcagaggttgcagtgagccgagatggcaccattgcactccagcctgggcgatggagcgagactccgtctcaaaaaaaaaaaaaaaatgctgctgggacaagcatccaaaccaaccctcccttttctccatagcctacaagatacatgtacaaaataacatctccctccaccttcaaacgaaacccaaaagccctcgtgggaagacgcacagcacgcgggattctcaccaccagatgcctagcatctgagatcaatgaatgctaaggacaggaatcacactcatgtcaggaggcaccaacaagtcttgatgcagcctttagtaaaacctggggacgagaactttcattttgtgagtttcctttttcatgtggattgcattgtctctactgccttctttgctttctctctacatccttgtgaagcgaagttcctttggaaaaattccagctggccgggcatggtggttcatgcctgtaatcccagaactttgggagaccaaggcgggtggatcatttgaggtcaggagtttgagaccaccctggccaacatggtgacacctgtctcaataaaaatacaaaatttagcaggcgtggaatcccagctactcgggagggtgagatatgaggatcgcttgaatctgggaggctgaggctgccatgagccagatcacgccactgcactgcagcctgggaaacagagggagacactgttcaaggcctatcttttattattattattatttttgagatggagtcttgctctgtcacccaggctggagtgcagtggcaacctctgcctcccgggttcaagccatcctcccacctcagtctcacaagtagctaggactatatgtgacaccaccacgccccactaattttttttttatttgtaccgacaaggtctcactatgttacccaggctggtatcaaactcctggactcaaatgatccagcctgcgttggcctccctaagtactgggattgcaggcatgagccagcacaccctcccttgctttagttcttaaaagagactctcgcacattggcttcaggctcagctggatccaggtccttgaacaggttcaggaatctggaacctgtctctttcatttatatatttatttgagacagggtctcacactgtcgcccgggctggagtgcagtggcacgatcatggctcactgcaacctcagtctcctgggctcaagtgatcctcctacttcagcctcccaagtagctaagaccacaggtgtgtgccaccatgcctggcttaattttttattcacttatttatttatttatttatttgttctgagacagagtctcgctctgttgttgcccaggctggaatgcagtggcacgatcttggctcactgcagcctccacctcccaggttcaagcgattgtcctgactcaggctcccaagtagctgggactacaggcatgtgccaccatgcccagctaaattttttgtatttttagtagaggcggcatttcgccgtgttgattaggctggtctcgaactcctgaactccaatgatccacccacctcagtctcccaaagtgctgagattacaagcatgagccactgtgcctggccaattttttttattttttgtagagacacagtctcactatgttgcccaggctggtctcgaactcctggcctcaggagatcctgccaccgcttcccaaagtgctgggattacaggcataaaacactccgcccagtccctggtctcctttgtgtcggcttcatcaactgtcagttccgttctccagggttagcaattctaacagaagtcccgggatgatgtctcattggctcatcttgagatatgtggttatgactgaactacaagcagagggatgagattggccactctgggtcatgtgccccattttctttctttttttttttttttttgagacgaagtcttcctctgtcgcccaggctggtgtacaatgacgtgatctcggctcactgcaacctccacctcctgggttccagagattctcctgcctcagcctcctgagtagctgggattacaggtacatgccaccatgccccgctagttttttgttttttggttttttttttttgagacagagtctcactctgtcgcccaggttgaagtacagtggtgcaaccttcacctccccggttcaagcgattctcccacctcagccttctaagtagcttggactacaggcacccaccaccacacctagctaatttttgtatttttagtagagacagggtttcaccatgttggccaggatggtctcgatctattgacatcatgatccgcctgcctcagcctgaagtgctaggattacaggcttgagccaccacacccagcccacgcccagctaatttttgtatttttagcagagacagggtttcaccacattgcccaggttggtctcgaactcccgacctcaggtgctctgcccacctcagcctcccaaagtgctgggattacaggcgtgagccaccacgcctggccctacatgccccattctaaagctggcccctttccaagcacatggatgcaaatgggataatggctcccccagggaaaatcagaagaaagaggcatggatgctgcacccgcaaatgcagctgatacccagtccacctacactaagcaagttattaaggcttactaaaacatagtgttcgtacattcagaatagaaagttactgtaatttattgagcactctattttggtattccacctagaagcctggcagacacacaatacctcccagcattgcacacaagtgtacactgatagtataaatttccataatttcctggaggaacattttgtctttgtgttatcttgaattggccacggttttcaaccgctgttctttttgcttagctaatgataaatcactgtttagcttgttattagcaatttaatttgttgtgggttgtttggcaaattctacagtgtttaataatactcatttgcatcagcagtatttttggcctataattgttcaataaatagactttaagtcatgtatgcattgagcaaaaatagaaatcatctgtactcttattgcttaagcagatgtacccacaattccccaacttttagaaagcttttaggatgacattccatttttatcacctacttgtttttctgctggaaagtgggaatgggggtgaagccttaattccctcctaattgggctgggggaaaaaatttagagctgataacttaagagaactttgcatatactggttttagtaccttggaaagtttatgtggtagagtggcagagtatatgttttaaaaactggtcttaggccgggcgtggtggctcatgcccggcactttgggaggctgaggcaggtggattacgaggtcaggagttcgagaccagcctggccaacatggtgaaaccccgtttctactaaaaatataaaaattagtcggatatggtggtgtgtacctgcaatcccagctatgcaggaggctgaggcaggagaattgcttgaacccaggaggcggaggttgcagtgagccgagatcgtgccattgtacttcagcctgggcgacaagagcaacacttcgtctcaaaaaaaaaaaaaatggtcttaaattgtggacggtcttgaaaacttgatctaggacaaaggttggcaaatttcttctaaagtggatcagataataaatctttttggttttgcaggctctagtgtctctgtcacaataactcaaccctgatgctgcagtacaaaaatagccagaggcaatacatacgcaaatgggcatggcagtattccaaaaactctttaataacaaaaacaggcagccaaccaaatttggcccgtgggccataatttgtcaaaccctggtcaaggagtttggacttctttccattggatcattaaagatgttgcaggtgtgaatttcagttcccaatttagagacttaagagatgtaatcttatttttgttttttgtgcatttttttttgtttgtttgttttgagagcctcgcactgtcgcccaggctggagtgcaatggcgtgatctcggctcactgcaacctctgcctcccgggttcaagcaattctcctgcctcagcctcctgagcagctgggattacaggtgcccaccaccttgcccagctaattttttgtatttttagtagagacgaggtttcaccatgttggccgggctagtctcaaactcctgatctcgtgatccgcccacctcggcctcccaaagcactgggagtacaggcatgagccacctcacccggccaccttatttttctagaactgaaagtgatcactagttcaagtcctcattcttcaagagtggtgaaaagttcatctcaggtcaactcggagtgcttctacccttttccttggtaccttggtgctgcatcttatttccctagggcttggatggtacctagatgtgggagacagaagggtgagataaattgccaagtcattgcctccttacaatggcctcatggagggttcctcagaattgtgatgcttgattattggctgccatgagttgaactgagtcccccaaaaagatatgtttaagtcttaacccctagtacctcagaatatgatctgattaaggttgttacagatggaattagttaagatgaggttatatcgcagtacggcaggcccttaatccaatataactaatgtccttttaagaaaaagaggctgggcgcggtggctcacgcctgtaatcccagcactttgggaggccgaggaggatggatcacctgaggtcaggagttcaagaccagcctggccaacatggtgaaaccccgtctctactaaaaataaaaacattagccgggctcggtggcatgcacctgtagtcccagctactaggggctgaggcaggagaatcgcttgaactggggaggtggaggttgcaataagcggagatcacgccactacactccagcctgggtgatagcacaagactctgtctcagaaaaaagaaaaagagacgagacatagagacacaagggaggaacaccatgtaacaaggcagagatccatgtgctgcagctgaaagccaaggaatgccaaggtgaactggaggcaaaccaccagaagccaggaagtggcaaagaagatatctcccctacaggttttagggaacgtagccctacaacaccttgatgtcagacttctagcctccagaagtgtgcggtggtatattttgttgttttaagcacccagtttgtgctacttagttacagcagtccttggaaattaacacatcgcccaatggtattcactcctagatccactcttgttctcaccacttcagatctcctagatgtctgagccacatccttcgtcctaagtccattttcttctttcaaagtaatagaatggtggccaggaacatggctgcctaggttgacatttcccagcctcctttgcagtcagatggagtcacatgactgagttctcaccaatggggtgtgagaggaagtgacatgttccacttcctggtttgagtcttatgacatcataagcacttccttttttttttttttttttttttttttgagacagaattttgctctgtcgcccaggctggagtgcaatcgtgtgatctcagctgactgcaacctctgcctcccaggttcaaaggactctactgcctcagcctccctagtagctgggattacaggcatgtgccaccacgcccagctaattctgtatttttagtagagatgagttttctccctgttggtcaggctggtctcgaactcctgacctcaggtgatccacccactttggcctcccaaagtgctgagattacaggcatgagccaccgtgcccaggcagcactttcttcatagtctcttcctccttcccattggctggaattaagacttagtggggatccagcattgaccaggcagacaaagcaatgctgcacaacaggagattgtaaacatggctgcacattagaatctcctgggaactttttaagaaaaaagaaaagaaaaaagataaaaaccatgtccaggccctatcccagacaaaataaatcaaaatctctgaaggtggggcccaggtatcagtgtttttttacagcttccagagtgattccaaaatgtagctacattgaagacaattgccttagagaagggtaaactgagaacaggagattggaaacctgagtgacttccaggagctgacttgctaacacggaccatttataccaggttaccaggtgagggactctgacttccccagaaaacagaccactcacttttataacattaacttccaaaacaaaagcaactttgataaactcaaaaactgcatattagtttatctacaactgagatggggaagatttcttttttttttttttttgaaacagagtctcgctctgtggtacaggctagagtgcagtggcacaatctcagctcactgcaacctgcacctctcggattcaagtgattctcctgtctcagcctcccaagtagctgggattacaggcacacactgccacgcctggttaatttttgcatttttagtagagacagggtttcaccatgttgaccagggtggtctcgaactcctgacctcaggtaatccgcctgccttggcctctcaaagtgctgagatggggaagatttctgatggagcagggttttatttcatggacttggaagaatttttttgtttttttgagacagtttcgctcttgttgcccaggctggagtacagtggcgcgatctcggattactgcaacctccgccttccgggttcaagtgattctcctgcctcagcctcctgagtggctgagattacaagcattggccaccacgcccgcctaattttttgtatttttagtagaaacggggtttcatcaggttggccaggctggtctccagctgctgaccttaggtgattcacctgccttggcctcccaaagtgctgggattacaggcgtgagccaccacgcccagctggaagaactcttaatcccacccctgaccattccattcctcttatagttcatgagatctctgctcctctgtcctatctacttccactgcattttcaaacaagtcgttcaattttcaatctttctttatttgtttttgttttgttttgagtgagagtctcgctctgtcacccaggctggagtgcagtggcgtgaccttggctcactacaacctccacctcccgggttcaaatgattctcctgcctcagcctcccgagcagctgggactacaggcgcccaccaccacgcccggctatttttttgtatttgtagtagagatggggtttcactatgttggccaggctggtctcgaactcctgacctcgtgatttgtccacctcggcctcctaaagtgctgggattacaggcatgagccaccccgcccagcctcaattttcattatttcaaataacatttattgagtgcttactgtgtaccaggtattgtactgagcattttccttgtaatagtggatttaatcctcacatactgcagtgcagtaggcattgtcattactacattctacagataagaaactgtggttcagaggtacaatttaccaagttctatctaggtcacggtctatgctttttaattaagtatactgtcctatattccttctgaatgttattaacaaattttgttaataaaatgtcactttttttccttagagtcaaggttttgatctgtcacccaggctggagtgcagtggtgtgatcatagctcactgccatcttgaactcccaggctcaagtggtcctcccacctcggcctcccaagtagctgaggttacaggcatgcatcaccatgccaagctaatttttaaattttttgtagagatggggtctcactgtcttgcccaggctggtcttaaactcctgggctcaagcgatcctccagcctcagcctcccaaaatgctgggattactggcatgaaccaccgcacccagccaaaatgtcacattttatatgcccaatatgctttcagaaatgttaggtgcagtacacattaagtatggaagtcaatgaatttaagactttaaaagactgtatagatagtttttaatttggctccttttttttctttttgagacagagtcttgctctgtcacccaggctggagtacagtggcatgatctcaactctacaacctctgcctcctgggttcaagcaattctctagcctcagtctcccaagtagctgggattacaggcatgtgccaccacgcctggctaatttttagtacagacggggttttactatgttggccaggctggtctcgaactcctgacctcgtgatctgcccaccttggcctcccaaagtgctgcagttacaggagtgagctactgcacctggccaatttggctcctttcttaaaggtgagaaaactgagactgcattcacctatttgtcattcattcaacaaatgcttactggatattgacaagggctcactgttattgagagctaactatatgtcaggcactgttctggaccgttttcagatacttactcttgaaaccctcaaacacccttgtgatgtagccaactaatgggtaacatctctagttaccctatttcatgaatgaggaatccaagatacaaaaaagtaaagtccacactaatagtgggtggtggagaaagaattcaaacacaggaatctgataccacaggcacaatgctacattagctcataacttaaaagtcaccaaacacatgagaagctgctttgaaagacagaagaaataatcaaaaggagaagtaaatccccttccagtgtctgcagatactgggattgtcagatacagaagagtagtcatgagagaaatgactggagaaatgaaagacggctggacgtggtggctcaggcctgtaatcccagcaggtgcgtcacctgaggtcaagagttcgagaccagcctggccaacatgatgaaatcctgtctctactaagattgcaaaaattacccgggtgtggtggtgcatgcctgtaatcccagctactcgagaagctgaggcaggagaattgcttgaacccaggaggcagaggttgcagtgagccaagatcacaccactgcacttcagcctgggcaacagagcgagactctgtccaaagaaaggaaggaaggaagggagggagggagggggggagagagacaggaaggaaggaaggaagggagggagggaaggaaggaaggaaggaagggagagagagaaagaaaggaaggaaagaggcagtcataaaggtgatcaaagaacaagaaactttggggaacaaatagatgctttccaatataacataaaaatgaaaaatataatcgctgaaataaaaactcaactgacaaaaatcagcttaaacacaacccaagagtaaatgagtgaactcaaagatgtagctgaagaaataaccttgaatgtaacacaaagagacaagagatataaaatatgaaacaggctgggcgcagtggtctgtaatctcagcactttgggaggctgaggcaggaggattgcttgagcccaggagtttgagactagcctgggcaacaaagtaacaaagtaagatctcatttctacaaaaactaaaaaaaaaaaaaaaggtcgggcatggttgcatgcacctatggtctcagctacacaggaggctgaggcaggaggattgcttgagcccaggaggtcaaggctgcggtggaccatgatgatcacaccactgcactccagcctgagtgacagcatgagaccctgtctcaaaaaaacaataagtaaatgagaataaaaaataaaataaaatatgaaacagtaagagagatgaagggtaggagtattaaatttggctaggtgaggtgactcacacctgtaatcccagctctctgggaggcaggccaaggtgggtggatcacatgaggccaggagttagagaccagcctggccaacatggcgaaacccctgtctctactaaaactacaaaaattagctgggcatggtggcacacgcccataatctcagctactggagaggctgaagcaggagaatcacttgaacccggaaggcagaggttgcagtgagccgagagcatgccactgcactccagcctgggtaacagagcgactctgtcttgagaaaaaaaaaaaattaaattctagatgcacttaatcaaacatcccgaagaatcaaatagagaaaatggaggcgaggcaagatttaaagagataagacctgcaaattttctaaaattgatgacaaaccgaagtccacagactaaagacgcacagagtgaagatccaaccaggataaataaaaagaaatatatgcctaggcccatcttggtgaaacaaaacaccaaagatagacagaagatcttaacagcagccaggaagaaagtagacatcatctacaaaggcctggccatttcaacccaggtgactttccatcagtaatagtggaagacggaaggcattggaatgataccttgacataattggagcaaatgccattctccattcaagacccttgacagctttggtgccgtgagggttgaggaaggtcaccagtgaggaccactgggccctggcatccgaaaaagcaggtcactcatggaaagcactagaagcagagacggtagcaaggagactgccattgggactttattttttatttttatttatttattttttgagacaggatctcactgcgtcccccaggctggagtgcagtggcaacaatcttggctcaccgcaatctccgcctcccaggttcaagcgattctcctgcctccccagtagctgggattacaggtgcccgccaccatgccagggttctgttttgttttgttttttgagacgcagtcttgctttgtcacccaggctgtactataatggcactaatggcacaatctcagctcactgcaacctcctcctcccaggttcaactgattctcccccctcagcctcccaagtagctgggattacaggcacctgcgatcatgcccagctaatttttgtatttctattagagacggggtttcactatgttggccaggctggtctcaaactcctgacctcaggtgatccacccgtctcggcctcccaaaatgctgggattacaggcgtgagccactgtacccagccttgccattgggactttaacagcagcaaatctgttatgagcaaagtttttcctggacacaaatgaaacatccccccgcccgccacaccgcagaatcctgcaacatagtgtgggaagcttgtagcgaggagatgttgaggtcctccatgtggaaaataatgaggtattgaaattcaggcattaatgttaatggggccccatttgtatgcagtctaattgggactggacttttttgcttttagggtcgactaactgaccaataaattctaaattttgtttacaaactttggctcaggttaagctctgaatccatttgtctcagatacactctattgcccagatagtaagtgaatgtattagcatataaatgagattttgaaacaaagacatcaagatattgaagaagctgcatgcggtggtgcattcctgtagttccagctactcagaatgctgaggtgggaagatcacttgagcccaagaagtggacgctgcagtgggctgtgactgcaccactgcacttcagcctgggcgacagagccagaccctgtctcaaaaaaaaaaaaactgaacaaagagattcaagaaaacaatggctcaaataagaaacaagtttaactctctctcacctaagaatccagaaggaggcagatggtctgacacaagcagggggctccactgcacaaagtcacccagaaacccagctctttccatctcgctgatccattatatccaggatatgttttcttccatatgccaccctggctcacgacagtgtccttattggagtcatcatgaaagtagtaaagagaaaaagtagagagcaagcatttcattttatggaagcaacacagaagttacattgtttttccactcatattctattgctgggaccttgttcacatggccttatatagctgcaagagaagctgggaaatgtagtctctaactgggcaaccatgtgccctgctgatactcaagggagttctattcccaaaagtaggaagaggagaggggtttctgggacagatgacaatgtctgccatgaggggacaggagatgaaaaagaggatgccacagttaactcacaattatttttaagaaatagtaataatagctaccacttatgtacaatgtaccaggcactattctaagcatttgtatcaactcctttaatcctcagctctctgaggtagttactattattaatcccattttgtaaacgagaaaaagacataaataatgtgacacatgtctaataagtggtataactagagcgttaaaactctttagtcaaagccttaagaaaattcattttcaaacagtgactttggtcaatgcagtagctcgcacctgtaatcccagctgctcaggaggctgaggtgggaggatcacttgaggtcaggaatttaaaaccatcctgggcaacatagctagaccccatctctaaaaataatcttaaaaattagctgggcatgggggcttgcacctgttagtcctagctactcagtaggctgaggcaggaggattactttagtgcaggagtttgatgctgcaatgagttatgatcatgtcactgcactccagcctgggcaatggaccaagacctcatctcttaaaaaaaaaaaagtgattttgcattcacctataaagtaattatttgagggaatgcaaagaacgtttttaggactatgaaaaagaaagctagcaaagcaactgatttctagtttagtgcaaggaaggcaaaccatttactgaatagagaaaaaaatattctctctagtttatctctaaaagtaaatgctttgagaacataatctatttgcccttgggatgaagtcagagcaatttcaatctcaggatccaatctttctgccaaatatggtctctgttactaaccctcttgactagaaatctttgggagccaaagaatattcctttcctttccctaatatacagatgctgagagcaaacgtctgtctcctgggaatcctggcaggaaaaaatctaagattttttttttttttttttttttgccaccaagctactttgggaattaagatcattaaagactaatagcagctgctacgtacttagcaaatggagctaatcagacttccacaagtggggaagtatctaaatacaccactgctgctaaatcccagtcttgactgtggtgatatccattcccctcctgaccaggtaattagaaagaactggataatcactttagcaaaatagcagatgcagtgatatatcacacctgtccacaagctgtgtggcaggataaaaggtgaaaagtgcctctgagctgagaaatatcacagtaaaaatgatgcatcatagaagctgaaattcacagagccagcccctgtaagaagtacctgacacaggagcagtggagactcacagagtgggtatgttgcagacccaccaggtttgtatgcctgctgtgcagtaacataccaatcaaccaagacagcagggtttgcagcagagaaagagtttagtgctcacagggcatctgagtgaggagaaaagaggaacccccaaatctgtctccccaaggagttctgagctggggttttaagaggatcatggagggcaaggactggaaaattgagtctgattggttggggtaaggaggatgaaatcatcaagatatggaaactgcattctttggtaagtcagctctttgtggggtccttcagaccagctgacatcagtagtttcaccggccgggcacggtggctcacacctgtaatcccagtactttgagaggccaaggcaggcggatcacctgaggtcgggagttcgagaccagcctgaccaacatggagaaaccccatctctactaaaaatacaaaattagctaggtgtggtggtgcatacctgtagttccagctactcaggaggctgaggcaggagaatcgcttgaacccaggaggcggaggttgcagtgagccgagatcacgccattgcactccaggcagggcaacaagaacaaaactccatctcaaaaaaaaaaaaaagaggtagtagtttcactgatattcagggtctgaaagaacatctcaaatggaaaacttaatgcctcacaatgcttaggatgacatctatagagcagttaagggaaactataatcttgtaacagggtctacctgattctgatgcaataggaagcaaacagctataaggaagcaggccagagagcaagctgacttaatgattaatgctgaatgtgctgcaagcttggcttattttcacttctccccctccctttctccctgattaatttcataaagtttataggacgatttcaggcacagggatgcctgattggaaactacgtctcccagcctctcttggggctgggtgtagccagatgagtaaggtcttgctgatgcagggcaggttcttggctttgctcaagaaggaattcaagagtgagccggtggttggagaaagcagctttactgaggtagcagcagtgttacagctctgtgactactcctgctccccacaggcattgcaccaagagtagtagtgatctgcggtcatatttatacccaattttttttttttttgagatggagtctcactctgtcgcccaggctggagtgcagtggtgagatcttggctcactgcaagctccatctcccaggttcatgccattctcctgcctcaatctcccgagtagctgggactacaggcgcctgcaaccacgcccggctaattttttgtatttttagtagagacggggtttcaccgtgttagccaggacggtctcgatcttctgacctcatgattcacccgcatcagcctcccaaagtgttgggattacaggcgtgagccaccgcgcctgacctatacccactttcaatacatgttagttaaaagccagattattcagaaatagctagaaaatgggcggtaactttgggtgttgccatggcaaggggtggtagtttggggcgttgctatggcaatggtaaactctcatggtgctggtgggggtgtcttatggtgatgggcaacgaagaggtgcttttggtgcctttaatctgggccagagatgagtcctgcctgcctcctttcttattgccagtggaatgtgagccaaagtgatgagttgcttgcccaagtactggaacatagatgtgcctgagacccagtgtcaacctattaaatgaggacaataccctaagtaatgacctagcagcaagatgagaggaagcaggatcccaaatgactgtgtgtaaaacagctcttccctgccaacctggactgctcatggccaaatattgtgtgaaagaggggtaatcatctgtcctccacaagccactgtgtctgggagtccttttggggtttttttgtttgtttgcttgttttgttttgttttgagacagagtctcgctctgtttcctaggctggagtgcagcggcatgatctcagctcactgcaacctctgcctcccaggctcaagcgattctcctgcctcagcctcccgagtagctgagattacaggcctgcgccaccacgcccagctaatttttgtatttttagtagagacaaggtttcaccatgttggccaggctggtctcgaactcctgacctcaggtgatccaccctcctcagcctcccaaagtactgggattccaggcgtgagccaccgcgcccaggtttgttatagcttcttaacctttgccctaacacagtagactagttcatttaatcttcacaacaacccagggaactggttactattattattcccatttcacaaataagggaactgagactcagagaaagttaaatatttcacccaccatcccaaaatcaacaaatgatgcaaacagaagtggaagccaagtttcaagcccatggagaaggttctgattcagtaggtcctagacagaggctgaaattctgcatttctagaaagctcccagctgaggctgggaggtccatggattataatttgaggagcaaggatttaaaccactcccctcccttgtctcccctaagagttagaaactgactgtccaagcctgagcagtgtagtgagacctcatctcaacaaattttttttaattagctgggcatgatggtgcactcctgtaatctcagctacttaggaggctgaggtgggaggatcacttgagcccaggaggtcaaggctgcagtgagccatgattgtaacactgcactccagcctagctaacagagtgagaccctacctcaaaacaaaaaataaaaaaaagaaagaaactggctgggcgcggtagctcacgcctgtaatcccagcactttgggaggccgaggcgggtggatcacctgaggtcaggagtttgagaccagcctggccaacatggcaaaacccatctctactaaaaatacaaaaagtatctgggcgtggtcgtgcacacctgtagtcccagctactcgggaggctgaggcaggagtactgcttgaacctgggaggcggcagttgctgtaagccaagatcattccattgcactccagcctgggtgacagagtgagactccgtctcagaaaaaaaagaaactgtccagattcccaagttctagtctcaggtatctaaatgacaaccaataatagcttcctaaaaatgttttgccctttctgtactgttcccttctcctggaaattagttgaattcatatattcagttttcttaataggcaaattctctttcaagctttgaatttctcctaggcaggtgtcacgcttccaaggagcagttaccatgaaattgtgaaatatgatgccactttctggagatcttgtgacagctgtctcaccctctatcttttcttactctggctctgtaacccaaaataacattcaatgaggcttcttgggaaaggtgacatgtcattctgtgctgtttcaacaggaaacattgactacaataagaaacaccctcagcctggagagatattataatcaacagcaaaaaaccatttcagcacccaaaacacttgggaaatgtatccttgttgcaaacccaacttcagcctgaaaaatcatcgcattctaaaagtaaaccaaaggctggttccggtggctcatacctgtaatcccagcactttgggaggccaaggcaggaagatcacttgaggccaggagtttgagacaaccctaggcaacacaggaagatcccatctctgaagaaaaaaaaaaagaaagaaagaaaaattaaggctgggcgcggttgcccatgcctgtaatctcagcacttgggaggccgaggcaggcagatcacttgaggccaggaattcgagaccagcctggccaacatggggaaaccctgtctctactaaaaatacaaaattagccggcatggtggtgtgcacctgtagcttcagctactctggaggctgaggaagaatcacttgagcctgagaagtggaggttgcaatgagctgagattgtgccactgcactccagcctgggtgacagagtgagactgcctcaaaaaaaaaaaaaattaaaacaattagcatggtggcatgtgcctgtagtcctaactattcaagacaagaggattgctggagcccaggagttcaaagttacagtgggctacgatcaagccactgcactccagcctgggctgcagaacaagaccctgtctcaaaaaaaaaaaaaaaaaaaaaaggaaggagccaggggagcttattggtgactctgagatgtccaaggataaatctggcttcaaacatggctagatccagggctgccaaagataatattaggactcacgctctctctccatctgtcagttctgccacccacaggatctccccctctcccgtaaccaccatgagagctatggtggataggatcgcattttttatttatttatttatgagacagagtctcgctctgtcccccaggctggagtgcagtggtgctatctcggctcactgcaacctccgcctcccggatttaagcgattctcctgcctcagcctcccgagtagctgggattacaggcacccaccatcaatcctggctaatttttgtatttttagtagagacggggtttcaccatgttggccagtctggtctcgaactcctgacctcaggtgatccacccgccttggcctcccaaagtgctgggattacaggtgtgagccaccacgcctggccagattgcattttcagaaatgcagtacctctgcactctgcatgtgactgtgccctcccaccgtgggtagagtatatttccccaccacactgatactggggttggtcatgtgacttcctctggcatatgggatgtcagcagatgtgaacaacagatgtaaatgtgcccgcagggcttagctgagctctttcactcaagtattctgccaggagaagagcatgccccagggaattgcttacccttatcctgagaattatcaaatgtggagcagagtaaacccaaccttggatttggcaccgacagaacccaaccaatccaacagcctgaagcagagtcatttatccaagtcttgaatggaggatcagctaagccaaactggacctttagaaccctgagcataagaataaaggcttattgtgaggaagcaagtctgagttttgggtggtttgttacatggcattattatagtaacagctgtaatcccagcattttgggaggccaaggcaggaagattactcgaggccaggagtttgagacaaccctaggcaacacaggaagactccatctctgcaaaaataaaaataaaaaaaaattaagcccgggcggcccatgcctgtaatcccagcacttgggaggctgaggcagggcgggtcacttgaggccaggaattccagaccagcctggccaacacggggaaaccctgtctctactaaaaatacaaaaattagccggcatggtggtgtgcacctgcagtctcagctactccagaggctgaggcagaagaattgagattgtgccactgcactccagcctgggagacagagagagactgtctcaaaaaaaaaaaaaaattaaaacaattagcctggcatggtggcatgtgcctgtagtcctaactgagtcattatccacacaccactcaacattcactcgcaagagcgtcattcatcacttgcacccagaaccaacaccagcaaaagaaataaaatctcatacaaaaatgcacctaaagggccgggcacggtggctcatgtctgtaatcccagcactttgggaggctgaggcagacggatcgcctgaggttgggagttcgaaaccagcctgaccaacatggagaaaccctgtctctactgaaaatacaaaattagccgggtgcagtggcacatgcctgtaatcccagctacttgcgaggctgaggcaggagaattgcttgaacccaggaggcagaggttgtggtgagccgagatagtgccattgcactccagcctgggcaacaagagtgaaactccgtctcaaaaaaaaaaaaaaaaaaagaaaaataagaaaagaaaatgcacctaaaagccgggtgtggtggcacatgcctgtagtcccagctactcaggaggctgaggcaggaggattgcttgagcccaggaggttgaggctgcagtgagccacgttcatgccactgcactccagcctggggaacagaatgagaccctgtctcaaaaaaaaattattatcctactattgatagatatttgagtttcaagttttggctaaaaagcctgctgtaaacattcttctacatgtgttttggtgcatataaccacctatttctattgacatatacctagctgtagaattgctagattatatgataaatgtatattcagctttagtggaaccttccagttttccaaagtggctgtactcctatcagtaatgtatgagcatcccttcccgtcactccacatcttcactcaaacttagtatttgttgtcagtccatttatttatttatttattttgagacagagtttcactcttgtcacccaggctggagtacagtggtgcgatctcagctcactgcaacctccatctccttggttcaagcaattctcatgcctcagcctccccagtagctgggattacaggtgcgcatcaccacggctggctaatttttgtatttttagtagagacgaggtttcaccatgttggccaggcgggtctcgaactcctgacctcaggtgatcctcccatctcggcctcccaaagtgctgggattacaagcgtgagccaccaggcctggcctggtcagtccttttaatattagccattctgatggagttatagttaatttgtatttctctactctgcaagggtgttaagtaccttattgtatattggtcactttttcttctttgctttttttttgagatggacccttgctttgtcatccaggctggagtgcagtggtgcaatctcagctcactgaaacttccatctcccaggttcacgcgattcttgtgcctcagcctcccaagtagctgggattacaggcgtgcgccaccacacccagctaaattttgtatttttcatagagacagagttttgccatgttggccacactggtctcgaattcctgacctcaagtgatctgcctgccttgacctcccaaagtgctgggattacaggcatgagccaccgtgcccagcctcactttttcatctttgttttgtgaagtgcctgtttaagtcttcacccactttcttattcactcacctggcttattgatttgtgagggttctttatatattccgaatatgagtcctttgagacaagacataatgcaaatgtcttctcccagtttgtggcttgacttttcactctcttcacgggatctctgatgaataaaagttcttaattttaataaagtctaattaatcagtattttactttatgattagtgctttttgggatctgattcggcttatccaagccaaataatatgtcttctccttgaaattcacaaaagcgcacccaaatgttaggtgtttttattagcaaaatttcaaaaatgttgatttattactttttactcaaaaaaagcgaagacatttttctgttattatttctttgtaataaaagactatataagagtctacaattcttattgtctgtttgtttgtttgtttttgagacagagttttgctctattacccaggctgcagtgcagtggcattatctcagctcactgcaacccccgcctcctgggttcaagcgattctcctgcctcagcctcctgagtagctgggattacaggtacatgccaccacatctggctaatttttttatatttttagtagagacagggtttcaccatgttggccaggctggtctcaaactcctgacctcaggtgatgcacccacctcagcctcacaaagtgctgggattacaggtgtgagccaccatgccccgcctgtttgttttttttgaaatgatctcactctgtcaccaaggctggaggggagtggtgccatcatagctcactgcagcctcaacctcccaggctcaagcaatcttcccaactcagccacctgagcagctgggactacaggcagacactactatgcctagctaatttttttttattttttgtacatacagggtctcactatgttgcctaggctgaacttctgggctcatgcaattctcccacctcagcctcccaaagtgttagaattacaggcctgagccaccgcacccagcctacaactcttatagcaatgttgccttcaaaggcagtttgggccacgtgccatttttgcctctgtccctgccttcttaacctacaccctgtagaaggtgcaactccactgtaagaacaactgcagctcctcaaatatcccatgtgctgcctacatttcccagtatcccttgcgctttgattagcatcatgtgattagttttggccaatgggctgtgagcataaatgatgcatgccatttccagactgaggcagtgaaaaactggcattcctcctctctccctcttccccctgcccaataaccttggaaaccatatgttctagatgggagaagagggctggccaacctatctcagactgtgtatgagtgagaaataagcctttgttttattaagccactagatttcaggacttaactattgcagcagctggcattccttagtctaactaatacccaaggagaatcagaacagccattaataggaactaccaaaactctgcaagttgaatgcatgtcctgacagttcctttgtcctcagctcagtactgaggttatctttggcaaagttctccatcactgattttcttaggtcagattctcccaaaagcagtccctgagacaaggatctgggtgcaaataatttattaagaagtgttcccttctcagcaaactatcgcaaggacagaaaaccaaacaccgcctgttctcactcataggtgggaattgaacaatgagaacacttggacacaggaaggggaacatcacacaccaagacctgtcatggggtagggggaggggggagggatagcattaggagatatacctaacgtaaatgatgagttaatgggtgcagcacaccaacatggcacatgtatacatatgtaacaaacctgcacgttgtgcacatgtaccttagaacttaaagtataataataaaaataaaaaataaaaaaaaaagaagtgttcctagctgggcgcggtggcttacacctgtaatcctagcactttgggaggctaaggcgggtggatcacctgaggtcaggagttcaagaccagcctggccaacacggcgaaacctcgtatctactaaaaatacaaaaattagccgggtgtggtggtgggtgcctgtaatcccagctacttgggaggctgaggcaggagaatcacttgaacccataaggcggaggttgcagtgagccaagatcacaccactgcactccagcctgagcgacagagtgagatgtggtctcaaaaaacaaaaaaaaagaaaaaagaagtattcccagggtaatcaataaggggatggtggggaaagcaggacagggaaaacaaagaagcaaaacaaacattcaataccaagtgaagtttcacacccagactgttccagccagggacccctggagcgcaaactataccccaaagctggtcccacctagagacaaaggagaagggctttggaccctgtattcatcagcttgggctgctacaacaaaatgccacagacttagtgacttaagagaaatttatcctctcacagttttggaggctgagaagttcaagttcaaggtgccagcaaagtcaatgtctgcagagggctctccccttgggctatagacaactaccttctcatgtgtccccacatggcctttctctcatgcatgaagagagagacagaaacagaagtaactctctggtgtctctctctctctatttttgtttgtttgtttgttgtttgtctgttttgagacagagtctcactctgtcgcccaggctggagtgcaatggcgcaatctcggctcactgcaacctctgcctcccaagttcaagtgattctcctgcctccgcctcccaagtagctgggattacaagcatgcatcaccgcgcctggctaatttttgtatttttagtggagatggggtttcaccatcttggccaggctggtctcaaactcccgacctcaaatgatccaccctcctcggcccctcaaagtgctgggattacagtcatgagccactgtacccggcctctctctctctttttaagagacagggtcttgccctattgcccaagctggagtgcagtggtagaatcatagctcactgcagcctttaattcctgggctcaaagaattctcccacctcagcgtctccagtagctatgattacagatgtacactaccacacctggctaattattttttcatgtatttttgtagagatggtctcactatgttgcctaggctggtctcaaactcctgggctcaagcaatccttccacctcagcctcccaaagcactgggattacatatgccagccaccgcaccttggtctgctgcctctttttataaggatgctaatcctattggatcagggccccaccctgaatacttcatttaacttaattgcctcctaaaagtcttatctctgaatacagtcacattgtggggcacagggatttggagggcacacaaacatttagtccataactgacccctaaacctattgatgattggctgccagggaaggttgagcaaggtaggctccaaggcactctggccctccatatgggcagggcagctccagggcccaagaacaacctctgaaggtcacaggtgtgagcaggtagcatgtaagcattaagaaaccaggggatggatgcactgaggtggggtgaggtccgggtgtggctgcccacactgcctgctactctgatgctgtatcagcaagaaacagcttatacatttctgttgtaatgggggaagcaaactttaatcatacatctgcagatttctctcactctacgccagcctgcagatgtcttctgctagagttaaaaatttccacggaattatctccaatctcctctcacagcctggtaatttggccaaaagaaatcccagatgtttcaaagaatccctaatagtgactgtagggctttgatttctcctcatccagttggtcccagggcactgccaagccctggttggtgtccttgtcaaattgctccgagagtgagcaaaaaaacggagaaacttgtgcccaaaacccaatcaagcatttgtcttaaaagcacactcgccttgaaagccagccaacttctgtgaaatagaaaagaatccattttctgcttctatttcttggcccttgaacaggcagtgactcaagactcaagtcagtggttggtgcagctgcaatgagacatccgtcagtgagctggcatctctgacaatggcgtgtgcccacagagaggctgtgactcaggagggcaggtggcactccatgatcccccaaagcagccaagccaggtggggtgccaagcatcccaggtgctcctgagctggaagaccgacagttttctaccagttgaagtcgtgtttggcaaagaaaccgttcagccctttaacagatattgacagcctgctagtttccaaaatggggtcaaaagatggagattctcctttgatggtgtcagcgggtgcataatggatgtgtggatgttctttgtgctcagaaacgtctgccgttccatccagttgcatgctgaagggaggtggggagctgccaactcctccacgacccatttcaaagtattaaaagaattgttagcaattccaggttgctggtgaaaacatctccttggttttctttcccccacttcaaatcacaaaccaacccaaccatttctagaatacacagctctactggggtcctattccatgtgctataggagactgcaaaacaaagtcttttttctttttttttttttttttttttgagacaggttctcactccgtcccctacgcaggagtgcaatggtgcaaacatagctcactgcagcctcaacctcctgggctcaagtaatcctcatacctcagtctcctgagtaagacaaaattttactggggcaatttcaactcttcgtaaggttttaccttttgaacttgtgctttccttttttttttaagatggagtttcactcttgtgtcgcccaggctggagtgcagtggcacaatctcgcctcactgaaacctccgcctccctgcttcaagtgattctcctgcctcagcctcctgagtagctgggattacaggcggctgccaccatgccaggctaattttcgtatttttagtagagatggggttccaccatgttggccaggctggtctccaactcctgacctcagacgatccatccgcctcaacctcccaaagtgctgggatacaggcatgagccaccatgcccagccttaagccaccgtgcccagcctgctgtctttattattattatttagagacaaggtcccactctgttgctcaggctacagtgcagtggcacaatcatagctcatcgtaacctcaaactgctgggctcaagtgatcctcccacctcagcctccagaggagctgggactacaagcacacactacctcactgggctcatttattttttattttttagagatagggtcttgcttgttgcccaggctggtcttggactcctgacctcaagcaatccccctgccttggcctctaaaagtgctgggattacaggcatgagccactgcacccggcttaagttatactttctacacacacacacacacacacacacacacacaaataatcatgttcgagttgcatagacttaagaagctcaatctacttacctactttgagaatgtcttaatttgaattcccccaggagccaagcctgcgacaaggatttgaggataagtagactatttaggaaatagcccctaggaagcatcggtagagaataagcaagaaagaggggaagagaaggcagctagcaaaggatacatccttagtgagttactgctgtgggcaataagggcttaatcccctgggaaatgggaggtggaaatccacctgacagttatcccactggaggggcaagggagctggaggatggatccgtgacctctgtcagtcattagcaggaagacggcacctgggggacttagattccccagcacttctggctgtcacagtgaagacaaaacagaccctggctgcaagagaaagcccccagggaaagaaaggcaggtgctcagagcaggtcttgggagccggaaatgaagctaatgtttgctaaagtgatgagggtgagggaataggtgtgaccttgagttgctggggatgaaaatcttgctacatgagcagtactaggcttttgtgacccaacaatagagaaatagaaaccaaaagactccatggatcaggtagagttaacttacagagaaaaaaagcctttttttttttttgagacagagtttcgctcttgttgcccaggctggagtgcagtggtgggatctcagctcactgcaacctccgcctcccgggttcaagcgattctcctgcctcagcctcctaagtagctgggattacaggtgcctgccaccacgcccggtaattttttgtatttttagtagagatggggtttcaccatgttggccaggctggtctcaaactcctgacctcaggtcatccacccgcctcggcctcccaaagtgctgggattacaggcttaagccaccgtgcctggcctaaaaaagcctgtttaaaaatgttttaggctgggcacggtggctcaggcctgtaatcccagcattttgggaggctgaggtgggtggatcacctgaggtcaggagtttaagaccagcctggccaacatggtgaaacccagtttctactaaaaatacaaaaattagccaggtgtggtggtgcgtgcctatagtcccagctactcaggaggctgagtcaggagaattgcttgaacctgggagggcggaggttgcagtgaaccgagatcgcaccattgcactccagcctgggcgacaagagtgaaactctgtctcaaaacaaaaataaaaataaaaataaaaataaaaaccctcccatagatgctccatacgctctaattctgtgtctccatccactgaaagcaaaattccaaggctttggctatggtggagcctcaagatggaaagaccttggatttctgaaatcatgggccgatgatcatgaaaatgcacctctgggatctgcaagaagtgtgattgaacaagcaccccagctgctgggctctgaagtccagcacgtcataggaactgaggccatgtttcccaagggctgctcctcacccgggcctgagcagagcagggacactgtggcaagccaggtcctgagagactcagaaatcttctgggacaagcaactttggctcaatggcctggccaaagtctctcagaaatgtcctgcagtctaagatgcttccaccccaccacaacttcacatgagcaaaatcttccttctattgtctcttttttgtcaatttctggtaaataacttctattgtcttaaaacacactggagttaagggatttaggcgttacagcagcagtggttgccttaattcattaatacaggaggaaattgaggggccattgcccaaaaggttaagttcaaaaccacaactccaggactgcaattcagggatcaggaagctgatgctggccggcgcctgtaatcccagcactttgggaggccaaggcaggcagatcacttgaggtcaaggagtttgagaccagtctggtcaacatggtgaagtcccgtctctactaaaaatacaaataactagctgggcgtggtggtgcatgcctgtaatcccatctactcaggaggctgaggcagaggttgcagtgaactgagattgtgccactgcactccagcctgggagacagagcgagactctgtctcaaaaaaaaaaaaaaaaaaaaaagaaaaaagaaaggcagacaggaaaaggaagccaataaaaggtgtgataatgagcactgtattagttagctattgctgcataacaaattacctcaaaacttcagtgacattaaataacacgtatctattatctaatagtttctgagggtcaggaatctgggaacatcttaggtgggtcctcagctcttgggcctgtcataggctgcaatgtaaatacaaaaaagaaatcatgaaagtgacaagccctccttccccttgggtagatgacattggctatatttctggctataccacaccttcccattagcattcagacttccctttttggggggaattgtccagctgaaagttgtcttaacacaaggactgttcccaacactagcctcccagggcaagcctgtgacacacacttggtcaacccaaagctcattgctttggctcctaggtgagtgtcccagtgtcatttgagaatgtttgtagaacagtggcagagatggcatgtagtcagagctgtttgccatgagaccttggctctgaactctctagctgggatccaaggaggaaggtttatctaatacagacatgccaaggatgaacctcctatgaactttttatccagcgtgaatgcgcatggaagtttggcataacacacaagtgaccaggagaagggatgtgctgaactctgctaaaggcttttctcccacaatatcaaggaaggaaactgaacagagctggctttcaggcctagagacctccaccctacctggctcctatcttggaggaatactgtccccaagtgacggggagaattccaaggaacctctaggtgctaacattgacacctaaattcatgggtctgcagacttctaccatggaatgcaattgtcttcacttaggttctcccagaagtagacaatgacccaaggactcaatgggcaagtagtttgtttaagggagacgccaggagataccagtaggggaataggggtgtgacacagagaagagagggcagtccataaaggtgcatgatgagcaagttacctctgtgggcaacaggggttcagtcatgctggaaaatgctggggactgagtggaacacacaccttagagtcatcccacttgaggggagagggagctggggtatttatccaccagctcccattggtcactgattaggggggcttattagggaatgaagaatgtggctgttaattctcagatacttccactctgctattcagtctttggcagctttaaagaaagccctcaggggccaagcacagtgactcacacctgtaatcccagcactttgagagactgaggcaggaggatcgcttgagcccagcagtttgagactagtctgggcaacatagcaagaccccatctctactaaaaatgaaaaaaaaattagccaggcatagcccaggcgtggtggctcatgcctataatcctagcactttgggaggccgaggtaggcagatcacctgaggtcaggagttcaagaccagcctgaccaccatggtgaaacgccatttctactaaacatacaaaaattagctgggcgtagtggcgtgcgcctataatcccagctacttgggaggctgaggcagaagaatcgcttgagcccaggaggcagagattgcagtgagctgagatcatgccattgcacttcagcctgggcaacagagcaagactccatctcaaaaaaaaaaaaaaatagccaggcgtggtagcacacacctgcagtctcagctactcaggaggctgaggcggatggatagcttaagcctaggagctcaaggttgcagtgagctatgactgtgccactgcacttcggcctgggtgacagagcaagaccctgtcccaaaaaaaagaagaaaagaaagcaagcaagctgttgggggccgagtagagtggctcatacctataatcccagcactttgagaggctgaggtgggaggatcgcttgagcccaggaggtcgaggctgcgatgagctatgatcacaccactgtacggagcctggatgacagagcaagaccctgtctcaaaaaaaaaaaaaaatcccttgggcaagaagatacaaatactggtagctggtagtatcttcccagggttagggcaattcaacattagtatcagctacaacaatttataaccttcatggtattcactagacccccagagctcccagaatttatgcccttcctccaagcctgtttttgcagcttcttgtctattctgtgaacatctgcacttgtttccataaaacccattccttaaattgaagatccacagaactcactcctgttgcaaacaaaaaccttgactgatataccctgccatctgaaatttgcagtgaaataatctgtaaataactgggcattaacaaggcttttccagaagacaattttcaaggtaaccataaagaatgtatttatttatttattattttatttattgagacagagtcttgatctgtcacccaggctggagtgcagtggtgcaatctcagctcactgtaacctccgcctcccgggttcaagcgattctcctacctcaacctcctgagtagctgggactacaggcgtgcgccactatacctagttaattgcagttggagatcgcgccattgcactccaggctgagcaacaagagcaaaactccatctcaaaaaataaaataaaacatatgatttttgagggcgaggagcagtggctcacacctgtaatcgcagcactttgggaggctgaggcacgcgtatagcttgagctcaggagttcaagatcagcctgggcaacatggcaaaaccttgtctctaccaaaaaaatacaaaaaattagccaggcattggtggcgcagcacctgtggtctcagctactcgggaggctgaggtgggaggatcgcctgagcccaggaggtggaggattcagtgagcaaagatcacaccactgcactctggcctgggtgacagagtgagactctgcctcaaaataaaaataaaaataaaaataaaaaatacgttttattattattcatgtatggtgaggccaacagatcaggatatgactgccattagaaaacacaaaagtttgttattcactcttcccgagaggacggggcactccatgccatacagggacacatgagaaagcaccagggttggtcaggaggcagaggtagtggggaaaacataggcaaaggtctttattgtgatttccaaagaaagaagcaggcaagggccgggcatggtggctcccgcctgtaatcccagcattttgtgaggccgaggcaggcggatcatgaggtcaggagttcgagatcagcctggctaacatggtgaaaccccatgtctactaaaaatacaaaaattagctgggcatggtggcgggcgcatgtagtcccagctactcaggaggctgaggcaggagaattgcttgagcccaggaggcagaggttgcagtgagccaagatcgagccactgcactccagcctgggcgacagagggacactccatctcaataaaataaaattaaaataaagtatacagacggaggccacgcaccatggctcatgcctgcaatcccagcactttgggaggccgaagtgggtggatcacctgaggtcaggagttcaagaccagcctagccaacatggtgaaaccctgtatctactaaaaatacaaaaaaaattagctggacatggtggtgggtgcctgtaatcccagctactcaggaggctgaggcaggagaatcacttgaacccgggaggcagaggttgcagtgagccgagatcgcaccattgcactccagcctgggcgacaagagcaaaactccatctcaaaaaaaaaaaaaaagtatatagacgaatatgcataatttatatgcaaatactatgctgttttatgtcagggacttgagcatccacagattttggtatctgcaggggtcctgaaactaatcctccttggacactaagggacaattgtattccttgagttatccaataactactgctcagcagttggtaataaaagttcagaggctgcatagaatcttcgtggcttctctgatttgactctgcaacactgtttcctttcatctccagcagagcatgccagctgcccggcaggcattcaaaatccagaattgaaggaaagcatatcgtgtgatcatctacttcttggatttgagtctttcccaggtgtggccatttctggatggtggaaggagatgttcctccctggaggtgaccctcagtcacatttatccctcatcctttcctgtatcctaaaaatagccaggatgctgggagctgttaaggctgcactgaggtatttttagccttaggatcctggagttggggcccagctgggctgagctgcaatgaaggggtgtcggggggcaggtggcacctcagagagcctttggagtggcccagtaatgtctcagttctgatttctgacttaatcaatggtgaaaattgagttatgggggaagaagcagaggaaggagtgaaatgcaaaaattcattcattcattcagtcagtcagtcagtcagtcagtcagtgtcaggctctgttctcagccctgagactacaagaacgaccaaaacaaaaatctgtgccctggaaatgaacaggcagagttcagaatatctacttgtatcagaaaacaaggaaaacgcctttaaagactaaaggagtgtttttgtcagatgaacatgggaacgaactgaaagaggctctccctagtcaaaatggggaccataacattctcttctgttagtcaaaagcctgtgtcataaaaaccttgcttacagatgttcaacgtaatttcttacagctccaatcagggcaattaaataagcagaccgtctaggggtttcacataacaagaataaatagctaaatgccagggatgtttgaaaagcaaaatatggttcattatttcccctgggagagtcgcactgagccacggattaatcaaaatacggagcatagcgcactgaaaagtattccattaccaggaagcgtaatttctgacttattctattttagaatagtaacaactgctaatttctgggtcctttctaggtgctaggcattatttcatgggccccaagaccgttgtctaacttgattctagccacaactcagcaaggagtatccagaccctttttgttttttgttttgttttgttttttgagatggaatttcactcttgtcgcccaggctggactgcattggctcatctcggctcattgcaacctctgcctcctgggttcaagcaattctcctgcctcagcctcccaagcagctgggattacaagattacaagcatgtgccaccacgcctggctaattttttgtattttcagcagagatggggtttcaccacgtgggccaggctggtctcgaactcctggcctcaagtgatctgcccgcctcagcctcccaaagtgctgggattacaggcatgagccgccgtgcccggccagaatatccagaccctttaagcacattttagcaaagaagaaagaggaggaggaaaagaatagaaggagcgggagggaaaagaatagaaggaggaggagagaaaaagagggaagaggaagtattttagtaatagtcatttttttccctttcagcatgtgaatacatgtatcagttagaattcaattctgctgcatagaagagaaaaataatagtggcttaaacagggcagaggtatatttttctgccatgtaggtgtaccacagtagttcagttcatggctggcaaggcagctccacaattatcaaggaccttaaggccttctaactttctgctctgtcatccttggcttccatcctcaaggttgcctcatgaccacaaaatggctgcgagagcaccagccatcatatccatgtcccagacaatattaagaggaaagcggctagggctaaagggtacacttctcaactgagccatcatcattaaagagtttattaaaagcctcattcagatattctaggtatccaggatcctggaattccctacttaattgaatccatgcccacattcaggacttgcatgggccttttccacaggtctattatcaaagtggaatgctggcccgacacagtggctcatgcttgtaatcccagcactttgggaggctgaggcagaaagagtgtttgaggccatgagttcaaacccagcctgggcagcacagcgagaccctgttgctacaaaaaataaaaataaaaaaaaaatactaggtgtggtaattaatgtagtcccagctactcaggaggactgcgtgagtccagaagttcaaggctgtaatgagctatgatcagaccactgcactccagcctggccaacagaatgaaaccctgtctcgaaatgaggttttttacctgggaggcagaggttgcagtgagccgagattgcaccactgcactccacccagacaacagagcaagactccgtctcaaaaaataaaataaaataaaaggaaaagaaaaaagaaatttcaggcagacgaggtcgcggcgccggaggccccagaagggtcgaaggcgccgcgggctggggtcggtggcttagggagcccgtccggccatggtggccgtggctggtggttggcgcggctgcgctgcggcccggggcagtgcggagccgggacagtcgcggcgctgacgcccgcgggccccagctgcagatatgaagcggagccgctgccgcgaccgaccgcagccgccaccgcccgaccgccgggaggatggatttcagcgggcagcggagctgtctcagtctttgccgccgcgccggcgagcgccgcccgggaggcagcggctggaggagcggacgggccccgcggggcctgagggcaaggagcagccgcctgccttggcctcccaaagtgccgagattgcagcctctgcccggctgccaccccgtctgggaagtgaggagtgtctctgcctggccgcccatcgtctgggatgtgaggagcccctctgcctggctgcccagtctggaaagtgaggagcgtctcctcccggccgccatcccatctaggaagtgaggagcgcctcttcccagccgcgatcacatctaggaagtgaggagcgtctctgcccggccgcccatcgtctgagatgtggggagcgcctctgccccgccgccccatctgggatgtgaggagcgcctctgcccggccgagaccccgtctgggaggtgaggagcgtctctgcccggccgccccgtctgagaagtgaggagaccctctgcctggcaaccaccccgtctgagaagtgaggagcccctccgcccggcagctgccccgtctgagaagtgaggagcctctccgcccggcagccaccccatctgggaagtgaggagcgtctccgcccggcagccaccccgtccgggagggaggtgggggggggtcagccccccgcccggccagccgccccatccgggagggaggtggggggtcagcccccccacccggccagccgtgccatccgggagggaggtgggggggtcagccccccgcctggccagccgtgccgtccgggagggaggtgggggggtcagccccccgcccggccagccgccccgtccgggaggtgaggggcgcctctgcccggccgcccctactgggaagtgaggagcccctcagcccggccagccaccccgtccgggagggagatgggggggtcagcccccccacccggccagccgccccgtccgggagggaggtaggggggtcagccccccacctggccagccgccccgtccgggagggaggtgggggggtcagccccccgcccggccagccgccctgtccgggagggaggtgggggggggtcagccctccgcccggccagccgccccgtctgggaggtgaggggtgcctctgcccggccgcccctactgggaagtgaggagcccctctgcctggccagccgccccgtccgggagggaggtgggggggtcggcccccctgcccggccagccgccccgtccgggaggtgaggggcgcctctgcccggccgcccctactgggaagtgaggagcccctctgcccggccaccgcccggtctgggaggtgtgcccaacagctcattgagaacgggccaggatgacaatggcggctttgcggaatagaaaggcgggaaaggtggggaaaagattgagaaatcggatggttgccgtgtctgtgtagaaagaaatagacatgggagacttttcattttgttctgcactaagaaaaattcctctgccttgggatcctgttgatctgtgaccttacccccaaccctgtgctctctgaaacatgtgctgtgtccactcagggttaaatggattaagggcggtgcaagatgtgctttgttaaacagatgcttgaaggcagcatgctcgttaagagtcatcaccaatccctaatctcaagtaatcagggacacaaacactgcggaaggccgcagggtcctctgcctaggaaaaccagagacctttgttcacttgtttatctgctgaccttccctccactattgtcccatgaccctgccaaatccccctctgtgagaaacacccaagaattatcaataaaaaaataaatttaaaaaaaaaaaaaaaaacaaaaacaaaaacaaacaaaaaaaaaagcctcattcaataacttctgcttacagctcattgggccactgctatctgcattaaattaggaaatgtagtcttttagctgagcacattgttacccccaataaatatgaaggtaggggttctgttaaaaagaagaatagagccaggcacggtggctcacacctgtaatcccaacactttgggaggctgaggcaggacaattgcttaagcccaggagttttagaccagcctgggcaacatagtaagaccccttctctacaaaaaataaaaaccagcagggcatagtggtgcatacctgtgatcccagctactcgggaggctcaggtgggaggatcactggagctggggagatgaaagctgcagtgagccaagatcacgccactgtgctccagcctgggtaacagagtgaggccctgtctcaaaaaggaaggaagaaaggaaggaaggaaggagggaagaaagggagggagggagggagggagggagggaaagaagaatgaagatgaatactgagactgcaattagcagtctctgccacaataaccatgctgcattttccatctggtttttactaattgcacaggaattctagccatgcccccttgcccttacctcttcacagtctgcaaaccagactgcttcccaagtgccaaaactggggtcttttgtttgctgttgagacctgctttgccacctgtaggccacagaatgaatgcccctgagagcagctctcaactagtaactgacaaaagttggtggataaatgccccagctctctcaccttccaatgagggacttcagcctacaccacacggaacagaagaactgcccagctgagctcagccaaccatagagtcatgagaaatcatcatcattgttctcagtctctgagttctaggacagtttgttactcagcaataggtaactgaaatgggtggaatgggatagaaataaatctttgttgctttaacgcccctaaaatttagcctatcctgactgactcaccctcattgtattcaccctctgctgaaagccaggggtttaaatctctgagcaggacatcaccctcaaacaaatgtggtttacttggtcttgtggaagacacaggatttgccagctatgtacggtcaagatcaatagcaagtctaaatggctttatgtaaagggaaacatgttctgtggctgggtttggtggctcaagcctgtaatatcaacactttgggaggccaaggcaggaggatcgcttgaacccagaagttccagaccagcctgagtaacatggtaaaaccccgtctgtacaaaaaaaaaaaaaaaaaaaaattattagccaggggtgttggtgcccatctgtaatcccaattcctcaggaggctgaggcgggaggattgcttaagcccaggaattcaagactgcagtgagccaggatcgtgccactacattccaacctaggtgacagagtgagacactgctcaaaggaaaaaaagaaaagaaaaagtgttctgcccttttattatgctggtgatatccaaacataattatcttgccatattcaaggtcctaaaaggcaagtctctctctactttccagtagaaataataagccatgtgttggtgctcacctatatgttcccctacatttcccagaatcccttgcagatgagacagacccatatgactcattctagccaatggattatcgccactgggatgaggcagttaagagctgatacattcctctgtccttctctttcctccctgaggtgattttggaagccttgtgagagatggtgctgttgcaaaatggaggaagactggatctctgcatcaccgcttggaggcgagcccctgctaactagcttacaggaataagaaacaaacttgtgctgtataaagctaccgaagtttctgatttgtttgttattggtactgaatatagccttatgctgtctagcaagcatcatttctggaaaaaggatgaattctcagggaatcttgcaaacattacatgtcattatccccagctacaatttgcataattcattttctgaggggaactcacagaacttagcaaagaactaccaaagataggtaggcagcactttgctgatcccatttgtttgagaagaaaaacaattttgagacagagtctcactcttttgcccaggctggagtgcgatggtgcaatcacagctcactgcagccccaatctcctgggctcaagcaatcctcctgcttcagcctcctgagtagctgggactacaggcacacaccaccacacccagctaatttttctgtatttttgtagagacagggtttcaccatgttgcccaggctggtcttgaactcctgggctcaagtgatccactcacctcagcatcccaaaatgctgagattacaggagtgagccaccttgccttgtggaaaatttatttattatgtgatgaatatcaagcttctttgtaaagaggatatagctaagagcctctcctagcagtgatgtacataagtcactccgcccatgtaagacgcagtttccccatttggaaggctggatggaaaggtctctgcaatctatcccctcatcaaaaaaaatttttggccaagcaaggtggctcatgactataatcccagcactttgggaggccaaggcgagaggatcgcttggggccaggagttaaagaccagcctgagtaacatagtgagacacccatctctacaaaaaagaatgttttcattagcccagtgtggcagcgcatgcctgtagtcccagctactcaggagtctgaggaaggaagatcccttgagtgcaggagttcaaggctgcagtgagctatgatcacaccactgcgctctagcatgggcaacagagtgagaccctctctttaaaaaaaaaaaaaaaaaaaaaaagagccaggcacagtggctcacgcctgtaatcccagcactttgggaggctgaggcaggcggatcacctgaggtcaggagtttgagaccagcctggccaacatggtgaaaccccatctctactaaaaatacaaaaattagcccggcatggtggcagacacctgtaatcccagctacttgggaggctgaggcaggagaatcacttgaacccaagaggctgaggttgcagtgagccgagatcacgccactgcactccagcctgggcgacagagcgagactctgtctcaaaaataaataaataaataattctttttaaaaaacacgctaattctagtttcagtctggatgataatttggggaagagaagcagagaggaaaatttggaattaattccctccatgtggcaacccctgaagatcacaaaaaagttacagtgagaatgggagcaaggattctaaaacttccccactcctggggaacctgctgtcctaaatttaaacttggaagagattttggcaacaccctcctgcctctttctgccaacaaactcactgaaattaacaaatggcctgtttgcttatgtttggtctgtccttagcgcagaaacggttctctgcgcccacaactgattatatccaaatttacttccagtttttcctctcctctcccctgttgggttgtgtcctcagtttgaaaggtcacattcatcaaattagaacatgaaaggttggcacacagacatttcgtgtgaatgcctaaatgcctggagcaggataagaagttaaaagaaaaaaaaaaacttttgcaaaagaaaaataattatcataacagctcaggcacagtcctagaggtttacatatattaaatttagcaacattggacttttttaacagcctgattttctctgccgtgcatgatttcctttgcccaaacaaaccattgcaacaaatttgtaatgcatagaaatgcagctatcggccgggcacagtggctcacccctgtattcccagcactttgggaggccgaggcgggcagatcacctgaggtcaggagttcaagaccagcctggccagcacagcaaaaccccatctctactaaaaaaacaaaaaattagccgggcatggtggcagacgcctgtaatcccagctactcgggaggctgaggcaggagaattgcttgaaccggggaggcggaggttgcagtgagcggagatctcgccattgcgctccagcctgggtgacaagagcaaaaatctatctcataataataataataataataaatttttaaaaaataaaataaaataaaaatgcagctatcatcctaaaatgtaaaatgtgagaagtggtgatcgaaaataacaaaaacaagccagatgcagtggctcatacctgtaatcctggcactttgggaggccgaggtgagaggatcacttgagctcaggagttcaagaccaccctgggcagaatagggaggcctcatctctacaaaaaatttaaaaattagccgggcatgatggtgcacacctgtggtcccagctacttgggagactgaggtgggaggatcatttgagccccggggggtcgaggctgcagtgagccatgattgtaccactgcactgctgcccaggcaacagagcaagacccccgcctttaaaagtaaataaataaaagacttgttttggaatatcaaacttttagaacttttggaggatgtgactttgaaatatctcagtttgactttggggtaggttttcatttctttcttcctttctgtgatatcctatttgggttcaaattccattcctcagcctctagaattctctccatccacagatcttacaatctgcatgccccagtcttctggattttgacatcaacttcatggaacgcaccagtctccccaccaccaccttatctgtggtttcactttttgtagcttcagctacctgcggttaactgtagtctgaaaatatgtgaataccgtacaataagatattttgagagagaccacattcacataactgtaattatttgctacaattgttctattgtattttcagtcattgctgtaattttcttttttttttttttttttttgagacggggtctcgctctgtctcccaggctggagtgcagtggcgcgatctcggctcactgcaagctccgcctcccggattcacgccattctcctgcctcagcctcccgtgtagctgggactacaggcgcccgccaccacacccggctcatttttttgtattttttaagtagagacggggtttcatggtgttagccaggatggtctcgatctcctgacttcgtgatccacccgcctcggcctcccaaagtgctggaattagaggcgtgagccagtgcacctggcctgttaattttcttacagtgcctaatttataagttaaactttatcctaggcatgtatgcataggaaagcacacagtatatatagggtctggtactatctgtggtttcaggcacccactaggactctcggaataaatatattgtccctcagataatggggagccgctatagtcctaataccagggctttgctgaggggctctgtaggtttgggttttttggggtttttttgtttttgttttttttgagacagagccttactctgtcacccaggctggagtgcagtggtgtgatctcggctcactgcaacctctgccttccaggttcaagcaattcacccacctcagtctcccaagtagctgggattacaggcacgtgcaaccgtgcccagctaattttttaatttttcgtagagtcagagtttcaccatgtcggccaggctggtctcaaactcctaacttcaagtgatccacccacctcagcctcccaaagtgctgggattgcaagcatgagccaccgcgactggtcgccttcaaactctttaaaagcatcaaggtcatagaagatgaggaaaggcaggggaatgatcccacgctgaaagaagctgaagggacctcacaactaaatacaacccatgactctgaattggacctttatgccctaaaggacaatattggggctattggcaaattatgaacaaggtctgggcattagatggttgtattagagcaaatttcttctcctcgttttgacaattgtttaatggttttgcaaaagaatgctcttgggtttaggaaacaaactctgaagtattgagggacaaactgaagtattgagggacaaactcggaagtattgagggacaaaactctgaagtattgagggataacaggcattgtgtcttctgccactaactttcttcttttttctttttttcttcctttttttttttttttttgagatggagtctcactctgtcactcaggctggagtgcagtggcctgatctcagcttaatgcaatctccacctcctgggttcaagccattctcctgcctcagcctcccgagtagctgggattacaggcgcaccccaccacacctggctaatttttgtatttttggtagagacagggttttgccatgttggccaggctggtctcaaactcctgacctcaggtgatccacccgcctcagcctcccaaagtgctgggattacaggagtgagccaccacacccggcctcaacgttcaatttcttgaaattgattattttgtaatcatgtcagagaatgttctcattcttttttgtttttgagacagagtttcgttctgtcgcccaggctagagtgcaatggtgcaatctcagctcactgcaacctccgcctcccaggttcaaacaattctcctacctcagcctcccaagtagctgagattacaggtacccaccaccacggttggctaatttttgtatttttagtagagatgtggtttcaccatgttggccaggctggtctcaaactcttgaccccaggtgatctacctgcctcagcctcccaaagtgctgggattacaggcgtgagccaccgtgcccagccagagaatgttctgattcttaagagatgcacactaaagtatttgagagtgaaggatcagtatatctgcaactaactctcaaaatatctaataatgtatgtgtatgtatatacatacatatctgtgtgtatatctgtagaaagagacaggcagaaacagatgaacctacgtaggaaacgttaccgactaaggagtgtaggtgaagggtttgtaggtgttcattgtactgtaatttttctacaggtttgaacatcttcaaaacaaaatattgaaaaaataagtcacggccgggcatggtggctcatgcctgtaatcccatcactttgggaggccgaggcgggtggatcacctgaggtcaggagtttgagaccagcccggccaacgtggcaaaaccccgtctctactaaaaatacaaaaattagctgggcctggtggcaggcgcctgtaatcccagctactcgggaggctgaggcaggagaattgcttgaacccgggaggcggaggttgtggtgatccgagatcgcaccactgcactccagactaggtgacagagcaagacgctgtctgaaaaaaaaaaaaaaaagggctgggcacggtggcttacacatgtaatcccagcactttgggaggccgaggtgggtggatcacctgaggtcaggagttcaagaccagcctgaccaacctagtgaaaccccgtctctacaaagtacaaaaaattagccaggcgtggtggcccatgcctgtaatcccagctacttggaggctgaggcaggagaattggttgaaccgtggaggcagaggttgcagtgagccaagatcgcaccagtgtactccagcctgggcgacagagcgagaccctgtctcaaaaaaaagaaaagaaaagaagccacctagtctatcgcctgtgttttgattatttcaagcacggactctgagtatcaaaacatcctcctcctgagagcctaatgaaggaaacagaggaagatttgagagtctcaggaacaacttggttgccacttagacgttaaccccagatgctccccatttccaacgatacctgcaagcgtgttttcaacaacatcgtggagtccagattaaagagctgttttcctcctcaaaaagtagagactccttcaagatttgcatgagccatttaggagccagggaaccttgggatagatgtgaatcttggaatgtgggttgttagaatattttaaagctggtgagaaaaaaattgaagtaaaacaaggatgtccaggcagaggcatctgcaagacaaattagcaccatcaccaccaccccgcccccctccccaacccagtcaacaaacaggacaagtaacacttctctgccctcgtgggaacagattgagtggaaggagttgatgggtggggaggtgacgttgccaaaatcccgaaatagagctgttcaaaacaccctttcacagcatgtcagacaaatgccggagtgattaaatgttgagtggagactttgagaagctgaaagaggagggcagaaactaggcatgaaaacatactcctttcatctccttccaaatctgggtcagcactcaactgcggcatcaggacactttctcagcatctgagaagcaacatcacctaatccaagtctgtcagggcgccaaaatactctggcttccggtgattagctgatttgtgcagtatgcattcatggagtgcttatgttccaagctctggaaaacacagtagcttctcccagttcctgccatcgggagcttgtagtccagcaagggaaatggggaagtagtgataatatgcttggttgaatttttttttttttttgagacagggtcttgctgtgttgcccaggctggagtgcagtggtgcaatcacggctcacagcagcctcaaactcctgggctcaagagatcctcccacctcagcctcccgagtagctggggttacaggcactgcttgaattattgttccagttttttcaatcctctgtagatccacactctgtgtgccgtgggactttgctgttattctcaccaaaagcagaacccttgcctcttgactttgggctgtttgggctgtgggaccagctttgctcaacaggtaaccagttccaagcatccctcaagaagcctcccatgtctccacttggcttatctctgtcatcatcatgagggaagcttcctcccaagaatgattattcctttggccgaggcctcagaatgaatacatgccagccaggcacagtggctcacgcctgtaatcccagcacttttggaggccaaggtgggcggatcgcctgaggtcaggagtgtcagaccagcctggccaacatggagaaaccccatctctacaaaaaaaaaaaaaaaaaaaaagtcgggcgtggtggcaggtgcctgtaatcccagctactcaggaggctgaggcgggagaaccacttgaatccaggaggcagaggttgcagtcagccgagatcacaccaccgcactccagcctgggcagcagagtgagactatgtctgaaaaaaaaaaaaagaatgaatacatgcagaattgatctaaacccaacctgcagagagaggccaaagcatgcatcaaagctgtccagctggtccccacccacatcagccaagtcctcagacatgtgggcaaaaataaatgattgctacttttggaatagccatcacaatagcccatatgctgggctgtcaagcaagtctcaacaaattttgtagaactgagatcctacaaagtatgagcacagtggaattaaactagaagtcaacaacaaaaaagataactagaaatttacaattgtttggaaatttaaccacacatccctaaataactcctaagtcagagaaaaaaaaaatcacagtggaaataagaaaatattttgaactgaatgctaatgaacatacctgaaaaaatgctgtgggatgcagctaaagcagtgctgagaggaaaaggcatagctttgaatgcctgtatgaaaaacgaaaaaaagcttaaggtattgttatttcaagatactgagttttggggtctcttttcttgtgcagcaatagctgactgctatgataagtagcatttatactgcattcattatgtggcagacccaagtaaacagaaccacacaggttatgtgaatggccagtaaggagtaaagtcagaattcaaatccagattggctctggcattaggctctcagcactgtgctatacttctcctagaggagaaacctaacaatcacgacattgtgataaatgctattaattcatagaagtgggtggacctaactcggaggattggaaaacacttccagaaagaagtgatgcttgacctgacagttaagagaaagtgaaggctgttgaaaaggttatgcagaggcccatgggcatgaacgacatagcccatagttcagtgtggctggcccatacagtgagcatgacttgtgtcaaaaaatgagaatgaagatgtagtccagatctgattcaagcctgtctaaagagggagatgatctgattagatttgcacctcaggaagatccatctgtagtatgtggaggattggaagagagatatgatgcaaaaattccagttaagaggccatgaaagggccgggcactgtggctcacacctataatactagcactttcgagggttgaggcaggcagaccacttgaggtcaggagtttgagacaagcctggccaacatggtgaaaccccaactctactaaaaatacagaaaaaactagccgggcgtggtggcgggtgcctgtaatcccagcactttgggaggccaaggcgggtggatcacgaggtcaggagattgagaccatcctggctaacacggtgaaaccccgtcgctactaaaaatacaaaaaaaaatagccgggcatgatggcgggcgcctgtagtcccagctactcggaagggtgaggcaggagaatggtgtgaacccgggaggcagagcttgcagtgagctgagatcacgccagtgcactccagcctgggcaacagagcgagactccgtctcaaaaaaaaaaaaatacaaaaattatctgggtgtggtggtgcacacttgtagtcccagctacttgggaggctgaggcaggagaattgcttgaacctgagaggcagaggttgcagtgaggtgagatcgtgccactgcactccagcctgggcaacaaagtgagaccttgtctcaaaaaaaaaaaaaaaaaaaaaaagaggccatgaaagcattgataaagactctctttttctttctttctttttttttgggaaacaaggtctcactctgtcacccaggctagagtgcagcagtgatcacagcgctcactgtaacctcgaccaccagagctgaagcgatcctcttggctcagcctcttgagtagctgggaccacaggcatgcactactatgcccgcctaatttttttatttttatttttatttttggtagagatgggggtctctctatttttcccaggctggtcttgaactcctagggctcaagcaagcttcacactagcctccccaagtgctaggactgcaggcatgagccacccatgactcctcttttcaactaggcatcattcttggatcctgtccttagcctgcttctgtcagtcttggcaaagaatcctgctaaattataccccaatccttaatattttatcaccctggccagccttcagcaagaatccttaagttagcatcttaatccatttgggctactctaacaaaataacatagattgagtggcttaaaagcaacagaaattcatttcccacaattctagtggctgggaagtccaagagcaaggcaccagcgcattcagtgcctgctgagaatctgcttcttggttcatagatgaccattttttcattgtgcccccacatggtggaagggttgagggacctctctgggatctgtttgatagaggcattaatcccattcctgagggctccagtcccataactttatcacctcccaaaggccctgcctccaacaccatcacattgaggattaggtttcaatacatgaatttgggcctggcacagtagctcacgcctgtaatctcagcattttgggaggccacggcaggtggatcacctgaggtcaagagtccaagaccagcctggccaacatggcaaaaacctgtctctactaaaactacaaaaattagctaggcgtggtgacatgggcctgtaattccagctacttgggaggctgaggcaggagaatcacttgaacccggaaagcggaagttgcagtaagctgagaatcatgccactgcactccagcctgggcaacagggcgagactccataaaattaaaaaaaaaaaaaccaaaaacatgaatttgaaggagacacaaacattgtctacaacaatggtttggcaagaatccccctatctgccgagtgcagtggctcatgcctgtaatcccaacactttaggagggaaaagcaggaagattgctggaggccaggagttcaagagcagcctgggcaacatagtaagaccctgtctctattaaaaataaaaaagaatccccctatgcttgatgtttcctcttagtcatttttcacccactaaacccttcactctgctcatcggctgtaaatgccaatctgtctttgctgttttggaaactgagctcatttctctgctgaagtctcttttcccctattacaatagtaccgaataaaactgtctttaccacttttaaccggtgtccagctctgtctcttcgacagcatccagatgagtcacaaagacctgaactaaagcattagcagttaggatccatcaagcatttctttaggatttattgttttaagtcctcagattttgtctaaggcaatgggaatgtagcaagcagtaaacacaacaggcaaaaatccctgccctgggccgggtgaggtggctaacgcctgtagaagtggcagaagttccatgcacccagactgcctcccacctcaagtatcagccacagcaactcatttttctgcctcggagcttttttgcagctattgaaggctgtctgcgtgcagatgctgccagaagttaggaagagataaagccccgaggaggtaacgctcaaccagtgcagagtcaataaatgaatgtgtcactccccaccctcatccgcttgggggactattctgactttttttctgcaccatttacttgcaggagtagctcaataatgcactcttcattggcttttcctcctaacctgtctgcctcttccaatatccctgttactgcttcctgaaaccattttccaaataaactatcagaaaagcaaaatgaagacgcaatcgaagagaacacttggggctgggcgcagtggctcacgcctgtaatcccagcactttgggaggccgaggcaggcagatcacaaggtcaggagttcaagaccagcctggccaacatggtgaaatcccatctctactaaaaatacaaaaattagccaggcatggtggtgcacgcttgtaatcctagctactcaggaggctgaggcaggagaattgcttgaacccaggaggcggaggttgcagtgagccaagatcacaccactgcactccagcctgggggacagggcgaaactccatctcagaaaaaggaaaaaaaaaaaaagagaacacttggaaagaccaggagtggacatgatgtcaaataaaagcagacagcccaagaataacagagtgaaacagaggcggaggaaaaaaagaattgagacttaggggaaagccatttcccatcgttaactactttcagggcaaaaggagaagtaattggagaagtgattggtttagtgatttttctaaaaatagtttctgtgttaattaaaatttacagagaaagcaaatcaatgtgttcccctttatctctgcctaatttctgtcctcccaactcatgagtggggctattgaagacattaaagagaacaaagttgctaaggacatgaaaacccatgggaaaacatccttacatgagtgaatgcctagagagccagccagtcccacctgtatccattctaaggcaaagactaaacatacaatttatcctctaaaaaaatccaggtgggatcaggtgtggtggctcacgcctgtaatcccaacactttgggagaccaaggtggggaggattacttgaggccaggagttcaaggccagcctgggcagcatagcaagacctcatctctacaaaaaataaaaataattagccggacatggtggtacacacctgaagtcccggctgttcgggaggctgaggcagaagaattgcttgaacccgggaggtggaggttgcagtgagccgagattgtgccactgcacttccagcctgggcaacagagcaaaactctgtctcaaaaataaataaataaaaggctcctcttgaggcaacgcctaaaacctagatgtaatgacggagctcttgtgccctcccgtgggcatcatgcctcagatcgggagagcagctctaagcgctctctggggagaagcttgtcagacacaagcatgcatctgtcaatggaattccaggcaccgaggccaacattagcatgcaagcgaaatgctgaaggatgttatgctaaatgcaaaagccaggcacagaaagaccaattccacatgctctcactcctctatgagatctaaaaaagttgaactcaaagatgcagagagaagaatgatgattaccaggggctgaatggggagtggtgggaagtggagagatttttgtctaagagtgtaagttgcagttagacaggaggaatactttttttctttctgcaagttatggtgtacatgagaaatgttttacatgtatataatgcatagtgattaaatcagggtatttagggtatccatcacctaagtctctcactgtcatgcaggctggagtgcagtggtgcgatctgggctcactgcaacctccgcctcccaggttcaagcaattctaatgcctcagcctcccaagtagctgggactacaagcacgtgccaccacacctggctaatttttgtatttttactcgtgacaggtatttttagtagcgacagggtttcaccatgttggccgggctggtttccaactcctgacctcaagtgatccgcccctccggcctcccaaagtgctggggttacaggcgtgagccaccgtgtctggctgagaaggaatactttttttatttgtgcaaattatggtgtactgagacattttttatgtgtatataatgcatagtgattaaatcagggtatttagggtatccagggtatctgtcacctaagtacaatacatttttttaagtatagtcattctactctgctatcaaacatggaatatggccgggcaccgtggatcgtgcctgtaaccatagcaggcaaggattactttgcctttcacctttgggaagccaaagcataaaaattacttgagtccaggagttcgagaccagcctagacaacacagccgacaaccttttttatttttttgagacggagtctcactctgtcgcccaggctggagtgcggtggcactatctcagctcactgcagcctccgcctcccaagttcaagcaattccccagcctcagcctcctgagtagttgagattacaggcatgtaccaccacacccagctaatttttgtatttttggtacagatagggtttcaccatgttggccaggctggtctcgaactcctgacctcaggtgatccacccgcctcggcctcccaaagtgctaggattacagacgtgagccaccacgcccagccttcttttttccctcttctatcaaatgaaactaccttaagtgcaagggcaagtgattccatcctggtagccttaccatctggtctaatgcctgacacaaaataaatgaccatccatgaacaaatcgatgagcgattcaattaattgtttacccagctcaggcctaaatgggaagaggaggaaagcaaagtagaataatatgagggcacagcaaaggatgcccctacaaaaccatgcgtagaacacctccccagaaacccccatactataggggttctggctatggccttcaacacaagtttaccaacaacaggtttcctttggggataatgaaaatattctgaaactaaatagaggtggttagccgcctgtgatctcagctacttgggaggccaaggcgggaggatcactggagcccaagaatttgagatcagcctaggcaccatagtgagaacttgtctcattttgtgtgtgtgtgtgtggttttttgtttttaaatgttgtggcggttgcataacattgcaaatgtactgccactgaactgttctttttaaactttttctttttttttgagatggagttttgctcttcttgcccagtcctgcctcagcctcccaagtagctgggattacaggcacccgccactacgcccagctaattttttgtatttttagtagagacagggtttcaccatattggccaggctggtctcgaactcctgacctcaggtgatccgcccacctcagcctcccacagtgctgagattacaggcgtgagccaccgcgcccaacctaaaacttaattttatgttttgtgaatttcagttcaactttgtttgtttattgagacagagtctctctctgtcacccaggctggagtgcagtagcatgatctcggctcacaacagcctcaaactcctgggcccaagccatcctcccacctcagcctcccgagcagccaggattacaggcacgcacctccactcccagctaatattttgtatttttttgtagagacgaggtctcactgtgttttccaggctggtatcgaactcctagtctcaggtgatcctaccgccttggcctcccaaagtgttgaaattacagaaaacagccaccctgcctggctcaatttaaaaaagaaaaaaactgatatacaaatttgaaaagttttgctaaaaaggaaaaacaaaggctccctctggctgcagtgtggagaatagactgccccatgaggcgaagtggattgtgatggtcatgaggaagctggagggtgtacctcagttctcgaacttcagttattatactttccttagttctatgacttatgaaatatttctcagccgggcgtggtggctcaagcctgtaatcccagcactttgggaggccgaggcaggtggatcatgaggtcaggagttcgagactatcctggccaacatggtgaaaccccatctctactaaaaatacaaaaattagctgggcatggtggcacacacctatagtcccagctactcgggaggctgaggcaggggaatcgcttgaacctgggagggggaggttgcagtgagccgagatcacgccactgcaccccagcctggcaacagagctagactctgtctcaaaaaaaaaaaaaaaagaaatatttctctcctttttttgagaaaagatctcactctgccacccaggctggagtgcagtggtgcaatcatagttcactgcagcctctacctcccaggctcaagtgatcctcctgcctcagcctcccaagttgctgggaccacagttgtgtgccctcacgcctggctaatttttttttttttttcagagacagggtttcgctatgttgcccaggctggtctcatacgcctgggctcgagcgatcctccccccttggcctcccaaagtgttgagattacaggcatgagccaccctgccctgtcctatttatgaaatatttcttgagggacatagaatatttggtctcagtgccagcaggcctgctgaatttcccgagtcttgggaaatgccaagaaataaaggtactatcaccaggcaagctggagtggtgagcgacttgatagtctcagaatgatatcgccagctgttggaaatcttgtagaactggctaacacccactgaacagttgctacgtaccaagcactgcattaatgcacttaatcctgacaatagccctgtgggctgatgggccagggttttgtttttgttcttgttgttgttttgagatggagtctcgctctctcacccaggctggagtgcaacggtgtgatctcagctcactgcagcctccacctcccaggttcaagcaattctccttcttcagtctctggagtagctgggattacaggcatgcactaccacccccggctaatttttgtatttttagtagaaatggggtttcaccatgttgaccaggctggtctcgaactcctgacctcaggtgatccgcccgccttggcctcccaaagtgctgggatgacaggcgtgagccaccgtgcccggcctaatgggctgttttatcaccgcctcactgtagcagtccctctggtgccgcaagtcccctctctgcatctgcaggagacagttccctgtgagacctgacttacttgtcccacctcaagcctggaccacacatcttttggctttcttcagccttctccaacccctcaaggcagcccaaaagtttggggctaaagaccccagggtgagctggacatggtagcccatgactgtaatcccagcattttaggaggctgaggtgggaggatcacttgagcccaggggttcaagaccagcctgggtaacatagggagaccttgtctctactaaaaataaaaatttttaaaaagtcaggcgtggtagcatgcacctgtagtcccagctactcaggggccgaggtggaagatcaaggctggagtgagctatgatcacaccactgcatttcaccctgtacaacagagtgagaccctgtctctaaaaaagaaaaaagacttcaggctgtaattgatcacagtgaacatcagcacatcgtatcacatgtcccctaataggctatactcaaaaggacgcatcatttctgtggaattcctgccagaaatgcataacctcataggcagagtagtcaaattcacagtgacaaaaaggtgctttccagggactgcgaggaagcagggaataggaaattattgctcaatgggtacagagtttcagcttggaaagatgcaaacatcctggagaaggatagcggtgctggttacacaacaatgtgatgtacttagtatcactgaactgttcacttacaaattgttaagatgggctggaggcgatggttcatgcctgtaatcccagtgctctaggaggccaagactttttgaggacaggagtttgagaccgccatgggcaaccccatctcccaatagcgagaccccatctccaaaaaaaattaagatggtacattttatattgtgtatattttgccacagttagaaagagaaagaattgtttggccaggtgtggtggctcatacctgtaatcccagcactttgggaggccaaggcaggcagatcacctgaggtcaagagatcgagaccatcctggctaacacggtgaaaccccgtctctactaaagatacaaaaaattagtcgggtgtggtgccgtgtgcctgttgtcccagctactcgggaggctgaggcaggagaatcgcttgaacccaggaggcagaggttgcagtgagccgagatcatgccactgcactccagcctgggcaacagagcgagactctgcctcaagaaaaaaaaaaaaatagccaggcatggtggcatatgcctgtaatcccagctactacggaggctgaggcatgagaattccttgaacccagaaggcggaggttgcagtgagccaagacctaagacaatcccatgtaacaaatgaggagatgaggccctgtattagtccattctcacattgctataaagaaatacttaagactaggtaatttataaagaaaaaaggtttcactggctcttttacctgcggtacagccatggttccatagcccgtacagggagcatgatgctggcatctgctcggcttctaggaaggcctcaggaaacttagaatcatggcagaaggggaaggggaagcaggtacgtcttacatggacagagaagaagagagaatgaggcaggaggtgctacacacttccaaacagccagatctcatgataacccacacactatgtagcactggaaggatggtactaaaccatgagactgccacccccatgatctgatcacctcccaccaggacccacctccaacactggggactacactctgacataagatttggaggggacacagatccaaactatatcaggaccagagaagttaaggagctctcccaaggtcccacagccaagaaatagcagaggtaaggctccaaccagacaacccagtgtcacactctaccctctcgatcactacactctgccacctctaagagttaagcaatttcccatttaaaatttcactaatttagacccagatttatgtccccataattccctattgtaaacccaaacaacattcttccaccaacttatttgaataacgtgtgtaggacagaaagaagtgacagcttgaaactactctaattttacttacgaataattgaggttgattcatgctgctttctaaaaaactggtaatcctcttggtgttccaggatgccaaatttgtcacgtacgtctcttacaacttctactattctctctcgaaagcagtactcaaaagcagacagtcacaaagatagggtactcaacaaggggtgttccaagacaggagaaagttaactttcccaaaacagatggaaagagccgaaaaggaagaaggaaaatgaaggaggagcttccgggagaaagacacattagtgttcaatgtcacaaagtctattagtagagtataaaaaaaaataatgggccaggcgcagtggctcactactgcaatcccagcaatttgggaggccgaggcgggtggatcacctgaggtcaggagttcgagaccagcctgaccgacatggaggaaccctgtctctactaaaaatacaaaaattagctgggcgtggtggtgggctcctgtaatcccagctactcgggaggctgaggcaggagaatcgcttgaacctgggaggcggaggttgcagtgagccaagatcgcgccattgcactccagcctgggcaacaagagcaaaactccgtctcaaaaaaaataatgataataataaagctggctgggcacggtgtctcacacctgtaatctcagcactttgggagacctaggcaggaggattgcgtgaaaccagttcaagacaagcctgggcaatatggcaagacgcctgtctctacgaaaaaaaatttttcttttaactacccaggcatgctggtgcgtgcctgtggtcccagctatttgggaagctgaggcaggaggatcgcttgagcccaggaggttgaggccgcagtgatccatgatcgtgccactgcactccagtccgggtaactgaggagtaagaccctgtctcaaaaaaaaaagaaaaaactaacctaaactaaactaaagagaccctaaaagggagcagtttagagaacatccaagcttgaatctttctcaggtaactaccttgaggtaagtgatactaaagggcatgaaagcgtctcttttatttctttttctttgagacagagtcttactctgttgcccacgctggagtgcagtggcacaatctcgcctcattgcaacctctgcctcccgggttcaagtgattctactgcctcagcctcccgagtagctgggattacaggtgcccgccaccatgcccagctaatttttgtatttttagtaaagatggggtttcaacatgttggccaggctggtctcgaactcctgacctcaggtgatccacccgccttggcctcccacactgctgagattacaggcatgagccaccgtgcccggccaagagcgtctttgtgttgggtcacttgggatgtagcttcttgctatttcttgttctaccaaggttttcattgccgagggctgccataacagtgtcaccaactgggtggcttaacacaacagaaatgtattcttttacagttctggtagctagaagtcagaaatcaaggtgtcagcagggccacactccctctgcaggctctttcttgcctcttctagcttctggtagcccctggcgttccttggcttatggttgcatcactctaatctctgcttccatcttcacatggccatcttccctttatctctctctgtcatctcctcttactgtaaagtggccactagtcaggctaggcatggtggatggcacctgtaaccccagagctttgggaggccaaggcgggaggatcgcttgaggccaggagttcacgaccagcctgagcaacataaaaaataccccgtctctaccaaaaataaaaaattagccaggtatagtggtgtgcatctgtagtcccagctttttgggaggctgaggcaggaggattactagagcccaggaattagcgacttcagtaagccatgatcatgccactgcactccaacctgggcaacacagggaaaccctgtcgctttaaaaataataataatagggccgggcgcggtggctcacgcctgtaatcccagcactttgggaggccgaggcgggcggatcacgaggtcaggagatcgagaccatcccggctaaaacggtgaaaccccgtctctactaaaaatacaaaaaaattagccgggcgtagtggcgggcgcctgtagtcccagctacttgggaggctgaggcaggagaatggcgtgaacccgggaggcggagcttgcagtgagccgagatcccgccactgcactccagcctgggtgacagagcgagactccgtctcaaaaaaaaaaaaaaaaaaaaaaaaaaaaaataataataataataataatagtaaggccaggtgcggtggctcacgcctgtaatcccagcactttgggaggatgaggcaagcagatcacgaggtcaggagttcgagaccagtctggccaacatagtgaaaccccgtctctattaaaaattacaaaaaaattagccgggcgtggtggtgggcacctgtaaccccagctactcaggaggctgaggcaggaaaattgtgtgaacccgggaggcagaggttgcagtgagccgagatcgcgccattgcactccagcctgggtgacagtgcgagactctgtctccaaacaaacaaataataacaataataataataataataataataataataataataataaataaaagacactagtccaatatttccaaaaacaaacaaacaaaaacactaagctgtggctggacgaggcagctcatgcctgtaatcccagcactttgggaggccaaggcaagaggatcacttgaggagttcaagaccagcctggccaacatggcgaaaccctgtctctactgaaaatacaaaaattagccagacgtggtggcaagtgcctgtaatcccagctactcggaaggctgaggcaggggaaccgcttgaacccaggaagcggaggttgcagtgagccgagatcgcaccattgcactccagcctgggtgacaggacgagactccatctcaaaaaaaaaaactaagctgttatataacagagacccaagaatgtagcagtttcaagaatatccaagaatgaagtcattttggactggggcccaccttaatgacatcatttaacttggtaatatctgcaaatagatttccaaatcaggtctcattcacagacactgagggataagactttgacatatctttgaggggacacaaggtaactcctaacagccatcacctcgagcactgtccccgttgcagggttgatgctgggatggaggaatgtccctgtttctactccatggaggagaaagagcacagagtagcccacacttggtgttagaaggcccgtacccagaaatgccatgcctcatcactgttcatttttcactggacggacggtgccctccatggctacacctggctacaatgaaggctgggacaagtaacccttaactgggccaccatgcaaggtgaaacagcaccactgctatgcaagcaaaagaaagcaaactttggtctgggcacggtggctcacgcctataatcccagcactttgggaggtcgaggagggcggttcacgaggtcagtagttcgaacccagcctgatcaacatggagaaaccccatatctactaaaaatacaaagggcgtggtggcatgcatctgtaatcccagctactcgggaggctaaggcaggagaatcacttgaacccaggaggcagaggttgcagtgagctgagatcgctccattgccattgcactccagcctgggcaacaagagtgaaactccgtctgaaaaaaaagaaaaaagaaagaaagcaaattgtacgatgccagcttcccctaatctgagcgtcttacataaccatgccacatttgtcaaaactatgatattaacattggtacaatactattaagtagacttcattcaatatcactgtcttttttggccaggcccggtggctcacgcctgtaatcccaacactttgggaggccgaggcaggcagatcacttgaggtcagttcaagaccagcctggccaacacggtgaaaccccatctctattaaaaatacaaaaattagctgggcatggtggcacaagcctttaatcccagctactctggaggctgaggcaggggaatcgcttgaacccaggaggtggaggttgcagtgagccaagatcatgccattgcactccagtctgggtgacagagcacgactctatcttgggaaaaaaataataataaattttttttaaataaaattaagggcagggagtggtggctcacgcctgtaatcccaacactttgggaggccaaggcaggtggaccatgaggtcaggagttcgagaccagcctggccaatatggtgaaacctcgtctctgctaaaaatacaaaaattagccgggcatggtggcatgcacctgtagtcccagctactcaggaggctgaggcagaagaatcgcttgaacccggaaggcggaggttgcagtcagctgagatcgtgccactgcactccagcctgggcgacagagcgagactccatctcaaaaagaaaaataaataaataataataacaataataataaaataaattaaattaagtctcttgctcacaagaggataaatgataggcatggtttcaacatgcttttctaatagcaatgagatgggacatttcaactctttagacacttttccccttggctgtatatttttgtgccacttcctggaattaagagcatattgtgggccaggcttagtggcgcacgcctgtaatcccagctactcgggaggctgaggtacaagaatcacttgaacctgggaagaggaggttgcagcgagccgagatcacaccactgcactccacagcctgggagacaaagtgagatcagtctcaaaacaaacaaacaaacaaacaaacaaacaaacaaaaaaacgttaaaatgaaggctatagtttagattcatcccccccacccaaggccaaccacccataaccacacaaagtttgtcatcttgattcccctgaaatgctagctctaatcataaatgaaacatgaaaatgtaagttttacatccttgtcagcatgattcagtgaaattaaaccaatcggctgtagacaaatgagcttaaacgggtctatttgccttaaaaagaagttaatgtaaaacagccaatcacaaaaaagctcaaaatacttcctcctttatgccttataaacttgccctaactgctgtaagagaacttcttaccacttgatttgacatctcctgaatcaagacttgctgtatgacaaagaacttttaatttttttctaactgtatctgattttatatatgtatgtatgtatgtgtgtgtgtgtgtgtgtgtgtgtgtgtgtgtatatatttgttttgttttgttttgttttagacagtcttggcctatcattgagctggagtgcagtggcatgatctcggctcactgcaacctctgcctcctgggttcaagtgattctcaagcctcagcctcccgagtatctgggattacaggtgcccactaccatgctgggctaatttttgtatttttggtagagatgggcgttcactatgtttgccaggctggtctcaaactcctgacctcaggtgatccacccgcctcggcctcccagagagctgggattacaggcgtgagccaccgcgccaggcctgattatatttttgacactaaaagtatcgtatgcaggaagacagctggcacacacggaaacttcatgcaaatagaatgaagtatgctctctaaaagacaaattagaagaaggtgccctatcctccaacttggagaacacagcctaggccggacttcagccccattctcatgccctcggccaggcacacttgttcagggcacaacctgcacaatcgtacacagtggccctgactatgtctgtatgcaactacaaaaacaataggccggacgcggtggttcacgcctgtaatcccagcactttgggaagccgaggtgggcagatcacaagatcaggagtcccagaacagcctggccaatatggtgaaaccccgtctctactaaaagtacaaaaattagccgggcatggtggcgggcccttgaagtcccagctactcgggaggctgaagcaggagaattgcttgaacccgggaggcagaggttgcagtgagccgagatcgcaccactgcactccagcctaggcgacagagcaagattcagtctcaaaaaaaaaagtgaagagaaaagaggatccggtatccaaatgtgttttatataaaatgaatcgttttcagtgcactgaggaagttttctatttaaagaaatcctgctgtgaactcttttgtgaagaatgctttcctaatggaattagtcaccactgagtcatttctgcaaacttcaggtttgcggttttgcctaagcaagatctggccggagaagtgagataaattatagatgtcgctaataaattacagattactcaaaggcaaaagaggaaagaaaaaaaaaaattgactcgtgtatatgaaccgaattgagtcaggggtctccaccggcgcttaatcatggccgagatcctcctgcttctgcctgtcctttggtagacacacgctacaagtcagcttctgtccatcgaggaagggaacgaactaacaacaaagaacaattaagagaaggttggccccgtgaaaacaagggaccattgaagagcgagtaaaggcttggccacgttctggccccgccccaccccggtcgccctgacaacagcgccggcgtctgggctgagcttcggactcgcagccagcctcccacaggccaccgcgcgcgctcacttgcgcatgcgcctcggagctggcttcaaccagcgaaggctgaacccgcttccagggtcctcgccgagctgggagttaggatccgagggggccaagagggataagaaaacttctctgggtgcccacgtggtactgagcgcccttgggagggctctggagaagaccatcgccttccagggtagctccctccctcaaaggtttgagatcatggtccagttctcgggtctcccagcctcagtttccccatttgtaggaaaggcgttcacagcctctatctcagaggaggctttgaggattcagagagctcagaagagggtaggctttgtggtgagcgctgggtaggacttcggggtgggagtggtgggctgaagagtccccgacaacagcccgaggaagtattattattgttcttattttacagggaaggaaactgaggtccagaaaagttatgactcgccccaaggggattgcctggcaggacgtgaaggggaagaggcccaccctggagtaaccctcactggagaatccagaggtgagatgagccttgtacctatctcagcagagggagtaggataatatttaaatattaagggtggggagaaggaatgaaggcaagaaataaaatgcccaaaatgccccaaacgccatccggaccataaaagtgatggcgatagtgttggacttaggagctcaaagatgctaaccttgacaggcctggtggcccaagtctgtagtctcagctacttggaaggctgaggcaggaggatcgctttagcccaggagtgccaatccctcctgggcaacatagtgagatccttgtttccttaaaaaaaaaaaaaaagtgcatactttctttctttttttttttttttttgcgacagagtctcactctgttgcccaggctggagtacagtggcacgatctcggctcactgcaacctctgccttcccggtccaagcagctctcctgccttagcctcccagtagctgggactacaggcatgcaccaccacactcagctaatttctgtatttttagtagagaccgggtttcaccgtgttggccagactggtctcaaactcctgacctcaagtgatccacctgcctcttcctcccaaagtgctgggattacaggcatgagcaactgcacccggcataaaaaatgcataccttttgaaattttttttttttttttgagacggggtcttgctctgtcacccaggctggagtgcagtggcgcgatctcggctcactgcaagctctgcctcccaggttcacgccattctcctgcctcagcctcccgagtagctgggactacaggtgcccgccacctcacccggctaattttttgtatatttagtagagacggggtttcatggtgttagccaggatagtctcgatctcctgacctcgtgatccacctgtctcggcctcccaaagtgctgggattacaggcatgagccaccacgcccggccttgctggaaaattcttaagcccacctggcatctccatcttagtcaaacggcccaccaacttcctgttcaaactgagctattttgatttctgagtttgttaaccttggcactactggcattcggggccggatcattctttgtagtgcaaaggctgtcctgtgcactgtgagaagttgagcagcatatccagcctctgctcattagacgccatagccaggcacggtggctgacgcctgtaatcccagcactttgggaggccgaggtgggtagatcacctgaggtcaggagttcaagaccagtctgaccaacatggagaaaccctgtctctactaaaaatacaaaattagctgggcgtggtggcacatgcctctaatcccagctactcgggaggctgaagcaggagaatcgcatgaacccagaaggtggaggttgtagtgagccgagatcatgccattgcactccaacctgggcaacgagagtgaaactccatctcaaaaaaacaaaaaacgaacattagacgccatgaacactccctcccaacccaatttgtcacaaccaaaaatgtctgcagacattgcccctgaaggggtgaagatggctcctattgagaaacactggccatgagccaagaattaaaagagagaaatctgttagttttcactaaatagatttgaattctttattttattttattgtttttgtttcattttattttgagaggcaggatctcactctgtcccccaggctggagtacagtggtgcaatcatgactcactgtagcctccaactcctgagctcaagggatcctcccacttcagcctccctagtagctgggactataggcatgcaccaccctgcttggctaatttttgtatcttttgtagagacagggtctcactatgttgcccaggctagtctcaaactcttggcctcaagagaccctctcacctcagtttcccaaattgttgagattacaggcgtgagccagcacgcctggtcttgaattctttaaccattgtcctctaccagaaagtatacactatattaattctctcactgtagagattgtttttttttttttgagatggagtctcgttctgtcacccagactggagtgcaatggcacgatcttcactcactgcaacctctgccaccgggttcaagtgattctcctgcctcaccctcccaagtagctgggattacagggacacaccaccacgtctggctatttttgtatttttagtagagacagagtttcaccatgttggccaggctggtcttgaactcctggcctcaagtgatccgcccgcctcggcctcccgaagtgctgggattacaggcgtgagccaccgcgcccggccctttttttgtttgttttaagacaggttctcactctaccacccagcctggagtgcagtgctgcaaacatagctcactgcagcctcaacctcctgggctcaaagggtcctctcacctcagcctcccaggtagctgggattacaggtgtgctccaccatgcacagctaattggtttttggttttagttttggttctgttttgtagaagtgaggcctcactttgttgcccaggctggtctcaaactccctggggctcaagtgatcctcccacctcagcctcccaaagtgctgggatgggcacaagcttctgcacctggctaagattcttaaaatagccagattttctggaaactggttgacccagttggattatatgaaacacaatggatgattgtaatcaacagttcaactgagtggaactagccctggccaaggatcaggagatcttagcagggcacagcggctcatgcctgtaatccagcactttgggaagcctaggcgggtggatcacctgaggtcaggagttcaagaccagcctggccaacatggtgaaaccccatctctactaaaaatacaaaaaattagtcgggcatggtggtgggcacctgtagtctcagctgctcccagctgaggcaggagaatcgcttgaacctgggaggcagaggttgcagtgagccgagattgcgccaccgcactccagcctggaagacagagcgagactctgtctcaagaaatcaggagacttgagtctgttgccagttctaccattacaagctctgtgacattatcacttaacttttccctggacttgttttcccctctgtcaaatgaggatgttgaggtgatttctaaggacttacaaacacccagattctgacaggatgctccctccccgtcccccaccagaagttattgaagccgcccagccaccccagtgtctgtgttttttttttttttctccagcccccagcccagtcccctaaacacatcttttggagtcagctcttccaagctgttgttaccactcagacaaactcattattattcctgatgctaatgggtaaattacggtggtggttaacacagcagtggcaggggctcctttgtgggaaattatggtgtttaagcacaagacaccctggggtttgcctgaggaaaaataaaatttaaaactggcctcttgcggccgggtgcggtggctcacgcctgtaatcccagcactttgggaagccaaggcgggcggatcacgaggtcaggagatcgaggccatcctggctaacacggtgaaaccccatctctactaaaaatacagaaaattagccgggcgtggtggggggcacctgtagtcccagctactcgggaggctgaggcaggagaatggcatgaacctgggaggcagagcttgcagtgagccgagatcgcgccactacactccagcctgggtgacagagggagactccgtctcaaaaaaaaaaaaaatggcctcttgctccacgatgtggtgtgtattttaggagtatcccaagtctggaatataggaatatccaagtaaattataggatataccaatatcattagttcttctgacctggctaatatgtatacaaagagccatagctcctccctttaattaattctctagagcatccacctgcttttctttctttcttttttttttttttttttttttgtgacggagtttgactctgtcgctcaggctggagtgcagtggcacaatctcggctcactgcagcctccatctcctgggttcaagtgattctcctgcctcaacctcccaagtagctgggattacaggcacctgccactaagcccggctaatttttgtattttttagtagagacagtttttctccatgttggccaggctggtcttgaactctggacctcaaatgatccacctgcctcggcctcccaaagtgctgggattataggcataagccaccgtgcccagcctaattttattttgtacttacccaaatactctaagtacttacccaaagactccctcattcatttattgattcattcattcagtgtatttactgagtgctactacgtagctctaaatgttggagatgcagtgataaacaaaataggcagtctttgccgttttgttttccatttttttaagagacagggtctcggccaggtgcggtagctcacgcctgtcgtcccagcactttgggaagccgaggcaggtggatcacctgaggtcaggagttcgagaccagcctggccaacatggcgaaatcccgtgtctactaaaaatacaaaaattagccaggtggtgggaagctgtgatcctagctactcgggaggctgaggcaggagaatggcttgaacccaggaggcggaggttgcggtgagctgagatcgtgccactgtgctccagcctgagcaacacagcaagactcattctcaaaaaaaaaaaaaaaagaaaaaagagggtctcgctctgtcacccatgctggagtgcagtggcacagtcatagctcactgcagcctcaaactccagggctcaagtgatcttcctgcctcagtctccacgctatctgtgactataagcacatgacaacacccagcctagtttttaaactttttttgtagagcatctcactatgtttcacaggctggtcttgaacccctgggctcaagggatcctcccactgcagcctcccaaaaatgctgggattacaggcatgatccactgtgcctggccacttctttgctctcttcagcttttgttctagtgtcttcagtttggatgatactggtcagaccattttctaggagcaggatcccaattcttcaagttcctgctcttcctgggtagttcatagaatcttctggccctttgtcctaatccaacaactgcagagtacatagaaaagcaggtagggctgggcgcggtggctcacacctgtaatcccagcaccttgggaggccgaggcaggtggatcacgaggtcaggagttcaagaccagcctgaccaacatggcaaaatcccgtctctactaaaaatacaaaaattagccaggcatggcggcgagcgcctgtaatcccagctactcaggaggctgaggcaggggaatcgctggaacctgggaggtggaggttgcagtgagctgagatcatgccactgcactccagcctgagcgacagagcaagactccatctcaaaaaataaataaataaatttaagttagccagatgtagctggttagtctcctattggacagttctagaccatactccatgcccttgggaaataatataaatgagacagttttccaaaggtaaataagcttcaggaatgccaacaaagtgctgctagctctttgtatggatgaatctatcagaatgatcactcttctggccttccctgcttcgaaacaggccatctgccccttggtgttgagtatcccagtagccattgggttctagaccaagctggacacagtgattcttgtgattcaaatgtttctcctcaactgaaaaagctcagggtgtcttttggactgtccctcaaaacctagctttccactaattagtgaagcatgacttttccatgccatgtctgttctgggaagtttcctcttcatcgtggccttgggccccagggaaatttcagtggatgagcagaagaagtggaaaaggggatgaaaagtcaggtggaatgacatcatccatcattatggcatcatcacagctcttacatcattgtcatcatagattgtcactgttatggattgattttcttctgattcttggtatccatttcttcacatgtgtttaaaactcttttgactgactgcttacctaacagaagtttcttgtgttgagttcctttgccagataaaaacaaaataaggctgggtacagtggctcacacctgtaatcctagcactttagaaggccaaggcgggcggatcacttgagatcaggagttcaaaaccagcctggccaacacggtgaaaccccgtctctattaaaaatacaaaaaagccgggcgtggtggctcacgcctgtaatcccagcactttgggaggccgaggcgggcagatcacgaggtcaggagatcgagactatcctggctaacacggtgaaaccccgtctctactaaaaatacaaaaattagccgggcatggtggtgggtgcctatagtcccagctactcgggaggctgaggcaggagaatggtgtgaacccgggaggcggagcttgcagtgagccgagatcgagccactactgcactccagcctggatgacagagcaagactctgtctcaaaaaaaaaaaaaaaaaaaaaattagctgtgcatggtggtgggcacctgtaatcccagctacttgggaggctgagacaggagaattggttgaacccgggagacagaggtggcagtgagccgagattgcaccactgcactccagcctaggtgacagagcaagactccatctctaaataaataaataaacaaacaaacaaatggatttatggttatttatataaatcagttgcactcaaatacatatagccctccattgtctttaacctttttaagagacagggtctctctgtcacccatactgaagtaccatggtgcgatcacagctcactgcagcctcaaacacctgggctcaagcaatcctcctgcctcagcctcccgagtagctgggactacaggtacatgccaccacacccagctgacatattttcattttaacttttttatagagacagggtctccttgtgttgcctaagttcattgtcttactagtgcattctttaatatgttttgatatttgacctctaagagagctgtatacattcacattagctggaaactctaattctttattccttcaactctactctatggatttggaagctctagctatggcaaacactccctcggtttgttaaaatgtgtggttgtggttggaacccacctccctgatactggcaccactggccttattcctgcctttgtgggccacagagatccaacccctcttcccacataccaggcctccagctccttctcctctctaggaacccaaagtttgagtctagtcctggcttctttatccttccagtcaccaattagagctcagaaagcaggtcaaataagttagaattttttttttaagttctgggatacatgtgcagaacgtgcaggtttgttacacagctatatatgtgctgtggtggtttgctgcacctatcaatccatcatctaggttttaagccccacatgcattacgtatttgtcctaatgctcttcctccccttggcccccattccctgacaggccccagtgtgtgatgttcccctccctgtgtccacgcgttctcattgttcaactcccacttatgagtgagaacatgcggtgtttggtttctgtatgtttactgcattactatttacaatagcaaagacttggaaccaacccaaatgcccaccaatgctatcactggattaagaaaatgtggcacatatataccatggactaccatgcagccataaaaaattgagttcatgtcctttgcagggacatgcatgaaactggaagccatcactctcagcaaactaacataagttagaaattttaatttatttttgtttgagacagaatcttgctctgtcacccaggccgagtacagtgatgagatcatggctcactgcagcctccaccttctaagctcaagcaatctttccacctcagcctcttgagtagcttggactacaggcacgtgccactatgcctggctaattttttgttttttgtagagacaggggtctcaccatgttgccgaggctggtcttgacctcctggcctcaagtgatcctcccgcttttgcctctcaaagcactggggttacaggcatgaaccaccatgcccagccagttagacgttttttgtttttttgtttgtttgtttgttttttatgtgatggagtctcgctctgtcacccaggctagagtgtagtggcgcaatcttggctcactgcaacctctgcctccgagttcaagcaattctcctgcctcagcctcccgaatagctgggattacatgcgtgcgccaccacgcccggctaatctttgtatttttagtggagatggggtttcaccatattggtcaggctggtcttgaactcctgacctcgcgatctgcctcccttgggctcccaaagtgctgggattacaggcgtgagccaccgtgcccggccttagacatttttatatttggtttgtggctgtgatcaaagccatttgggatgtctgcccagccctaccctcttcatatgagcacatccaaccctcaattgcagccctgcgcatagggttcagctaagccacacccagattcctgacccaaagaaacagtgagataataaatgttttaggcctctatactttggggtaatttgttacgcaaccagagataagtaatatattgtcaaaaccaggtaggctttaattagtctttccagatgtctgtttctttctttgtgctggctggaggcctttggcttttatagatttcttttttttttttttttttttgagacggagtttcgctcttgttgcccaagctgcagtgcaatggcgtgatctcagctcactgcaacctctgcctcctgggttcaagtgattctcctgcctcagcctcctgagtagctgggattacaggtgcacgccaccatgcctggctaatttttgtatttttagtagagatggggtttcaccgtgttggtcaggctgatctcaaacccctgacctcatgatcggcccacctcagcctcccgaagtgctgggattacaggtgtgagccaccatgcctggccagaaatttttttttaagagatggggtctttctttgatgcccaggctggagtggtgggaggatgacttgagcacaggagcccaagagtagcctgggcaacacaggaagacctcgtttctacaaattaaaaaaaaaaaaaaaaattagctaggcatggtgcctgtggtcccaactactcaaaaagctgaggtgtgaggacggcttgaacctgggagttcaaggctgcagtgattgcaccactgcacttcagcctgggtgacagtggagaccctgtctcaaaccaaaccaaacaaaacaaaacaaaacaaaagaagctattggagggccttataagctgcctcagaaccaaggacttcctaactttctcttgtttctccccatctcccaagcacagggaggggctctctttggaagttcccttatttgactgatgaaaacttcttccaaaagaaatgcagttgtcttaagatgactcctccctaagaatctcatcaaatatccaggaaatattaaccactggcaaagagaaaagactaaaaattggcatcatgtccaaacagacttcatctactcctctctgtgcagcttggagagattacatgggagactttatctacataataagacggcctttgttcacaatgaagttctgccctcacctttctgtcgcctccccaagagctcagaggaactttgtcccaggccactgtctgttcattgggcttcatcagttcccctgaacatcattcatttcccctcaaaactgcctacattccccatttctctctcccctaggaagacagtatttaactcacaaccatctggtccttctttgagtcccacttttttttttttttttttttttttttttgagacggagtctcactgtcgccagcgctggagtgcagtggcgcaatctcggctcactgcaacctccgcctcccgggttcaagcgattctcctgcctcagcctcccaagtagctggcattacaagtctcacattttatatggctcccatgcttacgcataaatgtctgtgccctttcttttgttaatctgtctattgtcagctcatttcagtgaaacttcagaacgtgaaagggaagttttccctttgccctatgccttcctttccctgtatcaattcctttggccccaccagaactggcctgcatttggtatctttatagaacagcctctttgtatcccaggctgatgttcaggctccatcacttgccctgtgcattaagtagtaacagtgagactctacaagccaaggcttctcattctcccctctctaggaagtcctgctcccaagatgacattctgtgccttttcagtcactaactcttggttcaggtacaagacaagggctcaagcaaaatccagatggactgagtgagattattggggtgaaatgcagttccctctcattcctggggatcagcgagcatgcctccctacagcacaccccccacctgactcattctgcctcatccaggtcagaggtccctccttacaggagttcttacagaaaccaactgaggtctgcttacccagcacagtaaaaccagatacccacactaaggtctttgcagtgatagaaagaaaggtgtttattgcagggcaccatgcaaggagaatcagggcagctcatgcttaagacctgaaatcaccaatggcttgcaggtgggggttttttaaggcaggtgtaaatttcagtaaaccagaagctacaagcaaaatcataaatcaatgcatggagattacacattggtttccacttaaaaaggcaggatatcttaaagtgggggcttacaggtcgtagatagatttaaacatctaggcagggcacggtggctcacgcctgtaatcctaatactttgggaggccaagatgggaggattacctgaggtcaggagttcgagaccagcctcgccaacatgacgaagccctgtctctactaaaaatacaaacattagccggatgtggtggcacatgcctgtgatccttgctactcgggaggctgaggcaggagaatcgcttgaacctgggaagttgaggttgcagtgagccgagatcatgccactgtactccagcctgggcgacagcaagactcagtctcaggaaaaaaaaaagaaaaagaaaaaaatagaaagcctgggcgcagtggctcacgcctgtaatcccaacactttgggaggccaagatgggaggattacctgaggtcaggagttcgagaccagcctggccaacatgacgaagccctgtctctactaaaaatacaaaaattagccggatgcggtggcacatgcctgtgatcctcgctactcgggaggctgaggcaggagaatcgcttgaacctgggaggttgaggttgcagtgagccgagaccacgccactgcactccagcctgggcaagactcagtctcaggaaaaaaaagaaaaagaaaaaaataggctgggcgcagtggctcacgcctgtaatcccaacactttgggaggccgaggcgggtggatcacgaagtcaggagttcaagccagcctggccagcatagtgaaacctcgtctctactatagatacaaaaattagctgggcatggtggcaggtgcctgtaatcccagctacttgggaagctgaggcaggagaatcacttgaacccgagaggtgaaggttgcagtgagccgagatcacgccacaggactccagcttgggcaacagagacttagtctcaaaaaaaaaaagaaaagaaaaagatttaaacatcttctgatttgcaatggattaaggaagagaagctttgtttaaaaattttgagtcagtagaaacatgtcaactggttaggggaagtaactttctccaagcccctcaggaggaaacttggaacaaaagggacataaagtttagtcttcacttcccccttatctggggtttccaagactctgaaagacaattcagggacatatgttaagatgttatctttaatttctatagggaaaccaaacatctctgggactctaacttccttagcttttgttttggatcattatgtcttttttgtttaacaagttacttatttacttctcaaggctagctaggggcctggaatttcccttgaaggaactcagaaatttcctttgtttccatgcttggggtctcgtaaaaaaggggatccctgctctgtctcagggtcttactgaccctcactccagcccattctcaaacaccctaccctctttaaaaatttctctggggttaggccgggcgcagtggctcacgcctgtaatcccagcactttgggaggccgagacgggcggatcacgaggtcaggagatggagaccatcttggctaacatggtgaaaccccgtttctactaaaaatacaaaaaattagccgggtgttgtggcgggcgcctgtagtcccagttactcgggaggctgaggcaggagaatggcgtgaacccgggaggcggagcctgcagtgagccgagatcatgccactgcactccagcccaggcaacagagcgagactccgtctcaaaaaaaaaaaaaaagatttttctggggtctcatggtcttttaagtcaaatgcatacaacccaaaacagtatagctcagaggacaagggaacaaggtttagcatgagcagttgtaggtcagctcctccacccctcactaactgtgcgacttaacctctctgggcctgtctcaccatctgtaaaacagaaatgatgaaaagtatctaccttctaggggcattctatgagattatgcatgtgtgagtgagcaccaagcattgctcagtggtgcctagtgggtagtgagcactcagtatgcagcaccatgactatgtaagaattcatttgttagtagagcccggctttagaacagagatggaacctggcaccgaataataaagcatggggaggccgggcgcagtggctcatgcctgtaatcccagcactttgggaggccgaggtgggcagatcacctgaggtcaggaattcaacaccagcctggccaacgtggagaaaccccgtctctactaaaaatactagctgggtgtggtggcgcatgcctgtaatcccagggctgaggcaggagaatcgcttgatcccggaaggaaggtggaggttgcggtgagccaagattgtgcctttgctctccagcctgagcaacaagagcaaaactccatagatagatagatagatagatagatagatagatagatagatagatatagatatatagatatctatagatctatagatatctatatatatatatatagatatatatatatatcaggaggaatagtagtaatattgtcatcacttctcaccctgtctttgataaattgccagttgaagtgtctgcttcatcactgagaaaagagtgtgttctttcctctctgaatccccaggaccagacatatagcaggtgtccaatgaacagctcagctgttgaatgaacaaatagattctgttaggccctacaaggcataaaagtaaattcagtctgggcacagtggctcatgcctgtaatcccagcactttgggaggccaaggcgggcagatcatctgaggtcaggagtttgagaccagcctggccaacatggtgaaaccccatctctactaaaaatacaaatattagccaggcatggtggcgggcacctgtagtcccagctacctgggaggctgaagcaggagactcacttgaacctgggaggcagagggtgtagtgagctgagaccacaccactgcactccagcctgagtgacagtgagactccgactcaaaaaaaaaaaagtaaattcaaaagccattcacctgtgcagaaggcagggccaggctaatctgaaggctctaagagaagtatccacccacttcttctgtaaaaggccagatggtaaatattttagattctttgggctctctcttcctctgtggcaaccactgaattcaaccctgttgcagacatagacaatagataaatgaatgggcccggctgtttgtaggtaggtgaaaaatggcttcccttcacctttataggttctttggctgggctacgaattaaattgacatgtaaacagacagggcaaaagccatatttaattatgtacctatgcaggggagtcccacaaaatacaagactccaaaaaggatcagagaggctgggcccagtggctcatgcctgtaatccaggcactttggaaggccaaggcaggcagatcacctgaggttgggacttccagaccagtctggccaacatggtgaaaccccatctctactaaaaatacaaaaaatagccgggcgtggtggaaggtgcctgtaatcccagctactcgggaggctgaggcaagagaatcacttgaacctgggaggtggagagcgcagtgagctgagatcacgccattgaactccagcctggaccacagagcaagactccctctcaaaaaaaaaaaagtatcaaagaaaagaataggggtttggggcttctgggaggatggtggtaacacaagttatgggagggtaaggggagaaattgtatgatggagaaagtctgtcttgttaagcaaataaaaaagtcttgcaggtaataaaagttgtctcagagcagccctcagaaggatacatgattgggaatggtttcactcttccctagttaataagatcgtaggaaagcattcctctttctgtctttaggcagataagagaaattcagagaaaacctctccttccctgcatttgctgttcccccaagtgcccttattttgaagcaatcagcagacaaaagcgcatatccctgtgttccaatgaaattttatttacgtacgctgaaatttgaatgttttattttcataagtcgtaaaatagtttttcccccacctaactatttaaaaatgcaaaaacagagcagtggttcacgcctgtaatcccagcactttgggaggcaggaggattgcttgggccctggagttcgagactagccggggcaacatagtaagaccttgcctgtgcaaataatttttcttgagacggagtcttgctgttgttgcccaggctggagtgcagtggcgcgatctcggctctttgcaacctctgcctcccgggttcaagcaattcttttgcctcagcctcccaagtagctgggactacaggggcccgccaccacaccctcgctgaccggctgcagcgcgcaggacagcacgcctgggagggcggtgccaggaggcgggcctcggattgggcctcacgtagtgggctggacagaggatggagcctcttggcgtaagcgcggttgggcggggcattcctggattggcccactccggcgtcgcagaacgcttggcgtatcgtccttcagccaatcagcgtggagctgctgcctcgccccgcctcacgccggcgtcctgggggcgcggagagggcgcccaggttcaccgcgctctcagcgcgcacttccgggcacggtcagggcgtgacgtcgggaggagggcaggtaagtgccggcgggcggaggagcggggagggccgggggtccggcagccgcctcaccctggcctcggagctgcccggcgcgcccttccgcgtcgggggacgcggagctgaggacccgatttagatgcccggagccggcccaggtcccagccaggaccaaagtccctgaggccccagctgagacctctgacccaagtgcccgggacccggtcccatcctagcccggatccatattatgcctgaagggtcctgggtttttgcatcgggaaaatgggaccaataagtccctatctcaccagattttataaaaatgattcttgtaaaaccgtgagcagcagaaatgactaaactgccaaacgtttaactcggcgtcaggcgctgccctgaatgccttaaccagccatttttacacataaggaaaatgaggcttagagagagaaaacaatttgccccaagtcaagcagataggaagcagcagggtggagctccgagcccaagccgtaagcccaggacaaacagggtcggtaattacttttgcaccaaggaccggagatatctacacgcccacccgatagccccgtctgccatttactggggtaacaaaaccatcttaagacacacacacaccctcgagctcctgtaaacggagtatttgctctttgcaggctcttcccgtgggttagttgattcacagcatccccagaaagtcagtcttgtcgtcgtcattcgccctttaccggtgacgaaatacaagcccagggaagcgcagtcactgaccaaggtcacccagctgatgaggagtggagctgggattcaagcccagggagccgtgtcccctaacgcctcaaggggcacttagctattttgttggcaaaagtatttttaggttggaagggaccttggaataatccaatctaaaggacacactttatagttggaggatacaagactaaggtgagggtagaacagtttatatccgggactttgcaccactgcctcaccacctcactacaccactcccactccatcagaagctcttccatcagcttctttctttctttttgttggagacagaatctcactcttgtcaccttggatggagtgcagtggcgtgatctcggttcactgcaacctccgcctcccagattcaagcgattctcctgcctcagcctctccagtagctgggattacaggcgtacgccaccaggcctggccaatttttgtatttttagtagagacagggtttcaccatgttggccaggccggtcttgaactcctgacctcaagtgatccacctgcctcagcctcccaaagtgctgggattacaggcgtgagccaccgagtccggcccccaagaatggttttaaattttctagtagttggggaaaaatcaaaagaataatactttgtgacatgacgattatgtgaaattcaaatttctgtgtccatcaataaaatttatattggcatgcagctacgcccgttcatttatatattgtttgggactgatttctagctatgaaagcagagttgagttgttggggcagagataatctggcctaaaaagctagaaatacttattttctggcccttgacagagaaactttgccaatctctgttctagaatacccttcactgcttcacagagtctctctttagtgtaaactagaacttctttcttttttttttttttttttgagatggagtctcgctctatcgcccaggctggagtgtggtggcgcaatctttgctcactgcaagctccgcctcccgggttcacgccattctcctgcctcagcctcccgagtagctgggactacaggcacccgccaccacgcccagctaattttttgtattttttagtagagacggggtttcactgtgtttgccaggatggtctcgatctcctgacctcatgatccacccgcctcggcctcccaaagtgctgggattacaggcgtgaagaacttccttctatatgacctaaaagcctcccttccaaacatgagagggggtctcaccacccctagtttgaggagcccctgcatttcccacctgtgtcacctgcactgactgtgacccttatggagcctcattcagttatctcagttgtttacccagttgacatttatctgggcctggcactgtcctaggtgttagggatatggcacagtgtgacctgccgggggagacataaaccgacacagggtgatatgatcagaattccaggaaacaagtgactatggattggatggttagatgagttcattggttttttttgtttgtttgtttgagacggagtctcactttgtagcctaggctggggtgcagtggcgccatcttggcttactgcaacctccgcctcccggtttgagccattctcctgcctcagtttcccgagtagctgggattacaggcatgcaccatcacactcggctaatttttgtatttttagtagagatggggtttcaccatgttggccaggctggtcttgaactcctgacctcaggggatccacctgcttcagcctcccaaactgctgggattacaggtgtgagccaccgcacctggccggatgaggtctttgatggatatgatatgtaggtcaagacctgtgacagggggctgggtgcagtggcttgtgcctgtgatcccagcactttgggaggccctaggtgtgtggatcacctcaggccaggagttccagactggcctggtcaacacagtgaaaccctgtctctactaaaaatacaaaaaaattagccaggcttggtggcgggtacctgtaatcccagctactcaggagactgaggcatgacatcacttaaacccaggaggcagagatagtgagccaagatcatgccaccccactccagcctgggtgatagagtgagactccgtctcaaaaaaaaaaaaaaaaaaaaaaagcctgtaacaaagagcttgcaaacctgaggaacagcaggtgcaggccagctgcacttggcctttgaagacagccaggaagccagtgtggctggaacagagtgaacgagagatagaggggtaagagttaggcttggagaggcaggcaggggccccacaggccgtgggaaggggtttgacttgattctaaaaaccatatgaatcatgggaggggtttaagcaggagagtgacacgtttgttcatattaaaagatcccagctgggcatggtggctcacacctgtaatgccagcactttgggaggttggggcgggtggatcatgaggtaaagagatcaagaccatcctgggcaacatggtgaaaccctgtctctattaaaaatacaaaattagctgggtgtggtggcgcacgcttgtagtcccagctactcgggagactgaggcaggagaatcacttgaacccaggaggtggaggttgcagtgagcagagatcgcgccactgcactccagcctggtgacagagcgagactccatctcaaaaaacaaaaagatcccctgggcagctgtggggtgagcaagtgtcaagggcagagtcgggagagagaagaccgtgctggcccacgtgagtgatgatgggtgctggacccggtgggggccacagagggatgaaagtgtcagatgtgatgcgtatattggctgtagagtggacgggactctctctttctaaacagacacgccgctttttggatgcctcctatgcctggcgggagtcttgtctgagctggcaccaccacacggcccacgacatcttcgcagggaagcctgtggaccctctgccaggctccacaagaggtcaggacagtgcagtgtgttcacaaggccagtttctgatcgtccgccccgaggctgaggaccagtaggcagctcccaagatggtgagtagacagcctcgtgtgccctgggtttctctcccagtctttgtaggaccctggaagcagcccctcctcccctcccagagctctaagatgatgatttcaatctccgggtcatcatcttttggtgcagtgggtctgaaatgtggctttgcgctaacatcacccatgggcactttttaaatgtttttttgtttcattttcttttgtttttgagacagtctcactttgttgcctaggctggagtgcagtggcacgctctcggctcactgcaacctccgccttctgggttcaagcaagcacgtcccactaatttttgtatttttagtagagacggggttttgccatgttggtcaggctggtctgaaactcctgacctcaagtgatccactacactcaacctaaatttccccttccccctttcccctccccctcccctaccccttcctttctctttctttctttcatttttttttaacaaggtgaaattcatataacataaaattaaccattgcaaggccaggcacagtggctcacgcctgtaataccagcagtttgggaggccaaggcaggcaaatcatttaagattaggagtttgagaccagcctggccaacatggcgaaaccctgtctctactaaaaatacaaaaattaggctgggcgcggtggctcacgcctgtaatcccagcactttgcgaggttgagctgggtggatcacctgaggtcaggagtttgagactaccctggccaacgtggtgaaaccccgtctctactaaaaatacaaaaattagccaggcgtgttggcgggagcctgtagtcccagccactctggagggtgaggcaggagaatcgcttgaacccgggaggtggaggttgcagtgggctgagaacatgccaccacactccagcctgggcaacgaaagcgaaactccatctcaaaaaaaaaaatacaaaaattagttggatgtggtagcacattcctgtagtccctgctactcaggaggctaaggcacgaggattgcttgaactcaggaggcagaggttgcagtgagccaagattgcaccactgcacccaagcctgcgtgacagagcaagactctgtctcaaaaaaaaaaaagaagaaaacaagagcgactcttcagccaggctcagtgttctttcttgagacctgtgttcaacggtactacatgtgtatctgcccagtggcaatgttaaatacttcttaccgtcaatcacagtctccaaaagagtgtgaaagccaccataggagcatctgaacctcatggaattttccaaagcaatgacaatgggttttttgcccaagtagcccttccccaatcagacactgagcccagcactgtcctctaaaatgtccccaagtcccccttatccaggtcctgccccctgaggctgcacaagtaggtttcctggagggagcctgtgtattagtccagtctcacgctgctcataaagacatacccaagggctgggcgcggtggctcacgcctgtaatcccagcactttgggaggtcgaggtaggtgggtcacaaggtcaggagttcaagaccagcctggccaatatggtgaaactttgtctgtactaaaaatacaaaaaaattagctgggcgtagtggcacatgcctgtaatcccagctactcgggaggctgaggcaggagaattgcttgaatccgggaggcggaggttgcagtgagatgagatcgcaccattgcactccagcctgggcaacaagagtgaaactctgtctcaaaaaaaaaaaaaaaaaaaaaaaagacatactcaagcctgggtaatttataaaggaaagaggtttaattgactcacagttcagcatggctggggaggcctcaggaaacttaacaatcatggcagaaggggaagcaaacacatccttcttcacgtggcagcagcaagaatgagcaagaggaaaagctccttgtaaaaccatgaggtctctcgagaactcattcgctgtcatgagaacagcatgattcgcccccatgattcgattcagttacctcccaccaggtccctcccatgacacgtggggattatgggaactacaattcaagatgagatttcgcctgtaatcccagcactttgggaggctgaggtgggtgcatcacttgatgtcaggagttcaagaccagcctggccaacatggtgaaaccccatctctactaaaaatacaaaaaattagctgggcgtggtggtgcatgcctgtaatcctagctactcaggaggctgaggcaggagaatcgcctgaactcgggaaacggaggttacagtgagtcaagatcgcaccactgcactccagcatgggtgacagagcaagactccatctctaaaaattaatagtaaaataaaaaatcagaaaaaatttttttgaatgagatttgggtagggacacagccaaaccatatcagcctctctctgagtcatgtctctgttctgctttgcagggtgaaaggaaaggggtcaacaagtactatcctccagacttcaaccctgagaaggtaagcaggctctccgctccaggtccacagtagcaaaaagacccacgtcatcccctcttggggttagagccactgctgcggaaggatgggtggcccccaaggtctttttgtcttctgcatgtcacctgagtctcgaggctgtcttcacttttgggtgataactgtggctctcctcagggacctgtaactccatgtccacactatactagagtatagtgtgtttacagcaggggcccaggataaggcagagcgcacagatgaagggtcagatcccatggcttccccagctccagcacctgtggcgtcctggttgtcccctctgcctggaatctcttcctccatttcaccatactctcacttccttaagtgcttttctcacagaggtcctccctgaccactgtctcgttctctgttgcattgctgagcactttatataatctcatagcccttataactccctcacttattcatttatttgcgtcttgtccatctcccccgctagaacattctctccctgaaggcagagatgttcatctatcttattgtggctgtgtccccacacagtaggtgctcagtaagggcccaagtgtcccagctgcctcgtcctgagtataggatttagcctctctatgccaaagtttctccatacgtcagaagggggaaataaaatgagctgacctcacagaatcattgagggataaatcctagctactcaggaggctgaggtgggaggattgcttgagcccaggaggtggagactgcagtgagtcataatcataccactgcaccccagcctgggctacagagccagaccctgcctcaaaaaaaaaaaaaaaaaaagccggcgccatggctcacgcctctaatcccagcactttgggaggccaaggcaggtggatcaccaggtcgagagtttaagaccatcctggccaacatggtgaaacttgatctctactaaaaatacaaaaattagctgggcgtagtggcccacacctgtagtcccagctacttgggagactgagacaggagaatcgcttgaacccggaaggcggaggttgcagtgagccgagatcacgccactgcactccagcctagtgacagagcgagactctgtctcaaaaaaaaaaaaaaaaaaataaggtgatgcacatgaagtccccagcgaatgtttgccagtcttgtcacctcacctcatcttccccataaaacctggaagtaataatgaccattatacgtagttgacagacaagggaaacagaggctcgggaaggcaaaacgtgaggtcactcgcccagggtcccctggctctttcagctcataaatgggaacagggctgggcgcagtagctcacacccggaatcccagcactttgggaggccgaggcaagtggatcacctgaggtcaggagttggagaccagcctgggtgacatggtgaaaccccgtctttactacaaatacaaaaaaaatagccgggcgtggtggcaggcgcctgtaatcccagctacttaggagcctgaggcaggagaatcacttgaacccgggaggcagaggttgcagtgagccaaggtcatgccattgcactccagcctgggcaacaagagcaaaactccatctcaaaaaataaataaataaataagagagggactattcaaactcacgttcctggttccaagcctacatgttccagtaagacctggatgccccctattgctatgaacacccgtcctgcaggacataagaatcaaggcctctcccacctgtgagacacttgtcccaaagcagtgggggtggcagaaaattgtgagctcctccagctcagcagcactaatccgctcctcatcctctccacacagcatggctctctcaaccgataccacaacagccacccgcttcgggagcgggctcggaagctgtcacagggcatcctcatcatccggtaaggcccagcatcacctgaggaccccaccgtcctgccccattccttcagtctcaaggagagttcagtgccctcattggcccagtgctgcagggtcttcattccataaagcagaaagtcaccgtatcagtcagttattgccgtgtgacaaaacaataagcatttattattgctcacatgtctgcagctcagcaaaatatctctgctgggcttggaagagcttggctgggctgggctaggctggcctgatctgggctgggctcccatgtgtttcagagttggctggctggggactggctggtttagcagggacttgacctgtacagctgggctctgctccgtgttgtatctcaacctgtagcaggccagcctggacttgatcacataggactctcaaaaaagacagtgatcgtagttgggcacagtgggtcacgcctgtaaacccagcactttgggagggtgaggcaggtggatcacttgagaccaagagttcgagagcagcctggccaacacagtgaaaccctgtctctactgaaaatagaaaaaattaggctgggtgcggtggctcacacctgtaatcccagctcctcgggaggctgaggcaggagaatcacttgaactagggagctggaggttgcagtgagccaagaccatgccactgtactgcagcctggcaacagagcgagactccatctcaaaaaaaaaaaaaaaattcgccggaattggtggcgcacacctataatcccagctacttgggaggctgaggcataagaattgcttgaacccaggaggcagaggttgcagtgagccaggatcgcaccactgcactctagcatggggaacagagcaagactctgtctcaaaaaaaaaaagtcgcagcagcacccaaaggcggctgtccctggacctggtcagtctgctttctagcaggcaggaagttcctgctcagttacaatggttgtgattctttttcttccatatatccatttcctgtgtaatgtgagtgcagcaactcccgttaacagggcagtctaataccccacccctcaaatcacaaccgcggccagagtcgcaggtgtggagacccagggagtgtccaagtggacaagtgcaagtaagatgctgtctgtctttgcagattcgaaatgccatataacatctggtgcgatggctgcaagaaccacatcggcatgggtgagcctctgcccaccctccattcagtcctgcaaacatcagaccccctaactgctggatgccgccggggtgggggtgggagggtcctgatcaggaatgagggaggagacgggcacccgagtgactggctggccatggaagcccctttgcagagggattaggaagccaggctctggcttccaatcccgtctctaactcctcctagttggggaaccctcagcaagtgacagtgagcctctttgtacctcattttacccatctgcaaaattcagatggcaatgaaattaccacccccgcctgacccccttccaggtgttcgttacaatgcagaaaagaagaaggtgggcaattactacacaaccccgatctacaggtaagggcggcttggtggcatcttgggaacaggtggggtggccacagggcgagggggctacaaagagcctgagttgcggggggaacccattccctgcaggactcctggaaatcgccctggttggtgaatcagggcacaccccacccccgcaaccctccatggctcccaccttcctcagtaaaagcccaagtcctccccctggctcacaaggcaccacacactctgcctgtcctttcttcaccctaacctcctcctgctgtccccctccctggcctcctcgttgtccctcacacaccccagggacacacccacctctgtgcttccacctggaatgctcttccccaggtagctccaaggctcctccctcacccggggtttctgctcaaacagcacccctcagagacaccttttctaaagtgagacttgacactggttgcttgtgcccttgctatcaaggtgggccctgctgggacgtcagcctttccatgagcaagttggcttttccactactcagcaatttccccagcagctggcactgagcctgccacagagcagcctgtcttgggcgggtttgttgaataaatgaactagtggacaaatgaatgaacaaatgaatgaacagaatgaacaaatgataagtgaattaacaaatggatggatgagcaaatgaatgtatgaattactttaacaaatgaatcagtgaaccaacaaacaaatgcactaatgaatgaacaaatgaattaacgaataaatgaaccaaaaaaatggatgagggaatgaatgaatgaacaaacagctgaatgaacaaatgaataagccaactgcagccccactgacagaaggtccgttctgggtgcccggatgtgcccctttttgcccgtggctctacacggcacacagtgggtgctcagtgaatttttgtcaaatgacaccattgggtggaaggaagcaggcagaggcgacagggctgtcctggtgcacagccacagcctcctgactcctgcccaccgctccctcccaggttccggatgaaatgccacctctgtgtcaactacatcgagatgcagacggaccccgccaactgcgactacgtgatcgtgagtggcgcccagcgcaaggaggagcgctgggacatggcggacaatgagcaggtgctgaccacaggtgagcgccacccacttacctgcctgggggccctggccctgagtctgcgctggggcccccaaagcccagccgagctctgatcgttgcagagcatgagaagaagcagaagctggagacggacgccatgttccggctggagcatggcgaggccgaccgcagcacactcaagaaggcgctgcccacactgagccacatccaggaggcccagagcgcctggaaggacgacttcgccctcaacagcatgctgcggagaaggttccgggtgaggggggctccagcccggggtcagagaggatgcatggtggaccaaggcccgggtccagccctccccccaccacatcctagctttgagcaggccactgtaccctctgagcctcagtttccccatctgctacatggtgaccatgccctgtcttaatccattctggctactataataaaaaataccatagacagaaacagtagaaatttggctgggcacagtgactcacgcctgtaatccagcacattgggaggatcgcttgaggccaggagttcaagatcagcctgggcaacatagtgagacaccaccccccccctcccccagcatctctaaataaataaataatagaaattaattttttttttgttttgagacagtagtcatctcgctctgtcatccaggctagagtgcagtggcgcaatcttggctcactgcacctctgcctcctgggttcaagcaatcctcctgcctcagcctccagagtagcaggaattataggtacccaccaccaccacgcctggctaatttttttttttttttttgagactgagtttcactcttattgcccaggctggagtgcaatggcatgatcttgggtcaccgcaacttctgcctcccgggttcaagtgattctcctgcctcagcctcctgagtagctgggattataggcatgcaccatcacgcacagctagtattcttagtagagacggggtttctccatgttggtcaggcaggtctcaaactcccatcctcaggttatctgcctgcctcggcctcctaaagtgctgggatcacaggcgtgagccaccgcacctggccaatttgtgtatttttagtagaggcggggtttcaccatgttggccaggctggtctcgaactcccaacctcaagtgatccaccgtggcctacccaaagtgctgggattacaggcgtgagccaccgagaccagccaaaataaacaatagaattttatttctcatggttctggagtctgcgaagtccaggatcaaggcgctggcagatccagtgtctggtgagggcccatttctcataggcggtggcttctagctgtgtcctcatgtggcagaagggacaaacaagttcccttgagcctccttttataagtccaataatctcattggtgaggacgtagcccttctgacttaattacttccccaaatgcctcacatcttttaacactgtcaacgttgaggattaagcttcaacatatcaatttgggggacacagacattgagaccatagctcacccctacctcaccatgccatgggagatacctacctggttgcctccttttatttatttattttttttctttttgtgactgggtctcactctgttgcccaggctggagtacagcggcaaatcatgtctcactgcagcctcgatgtcccaggttcaagcaatcctccccactaagcctcccaagtagctgggacccacaggcatgagccatcacacctggctaatgttgggttttttgtgttttgtttttgcttagactgagtctcgctcgtcgcccatgctgcagtgcagtggcatgatcccggctcactgaagcctccaccccaggttcaagcaattctcctgcctcagcctcccaagtagctgggattccaggttcccaccactgtgcatggctaatttttgtatttttagtagagactgggtatcaccatgttggccaggctggtctcgaaatcctggcctcatgtgatccacccacctcaacctcccaaagtgctaggattacaggcgtgagccactgcatctgacctggccaccacattttaaatggaacctcttggctgggcgcggtggctcacatctgtaatcccagcactttgggaggctgaggcaggcggatcacgaggtcaggagatcgagaccatcctggctaacatggtgaaaccccgtctctactaaaaatgcaaaaaaaaattagccaggtgtggtggcgggtgcctgtagtcccagctacttgggaggctgaggcaagagaatggcgtgaacctgggaggtggagtttgcagtgagctgagatcgtgccactgcactccagcctggccgacagagcaagactcttgtctcaaaaaaatatagaattaaactaaattaaaaaataaatggaaccgcccagcccatcccctacccacctgtcctgcattttttttctccttatcactgtctcaccactagaggccagctccaccagggcaagggtttttccctgcctgccactgtatgccgagtgtccagaacaaagcctagcacaaggtgggtatcccagaaatatttgtgggatgaggccgtgcgtggtggctcacacctgtaatcccagtgctttgggaggctcaggtgggaggattgtttgaggccatgagttggagaccagcctgggcaacatagtgagaccccatctctacaaaaaaaaatttttttttttttttgaaacagtctcccccctttcgccctggctggagtgcagtgacaacgatctcagcccaccgcaacctccacctccccggttgaagtgattttcatgcctcagcctcccaagtagctaggaccataggcgcatgccaccatgcctggctaatttttatatttttaatagagacaggattttgccttgatggccaagctggtctcaaactactggcctcaagggatccacccgcctcagcctcccaaagtgctgggattacagacatgaactaccaggcccagtctctacaaaaataaatgttttaattagctgggcgtggtggtgcacatctgtagtactggatacttgggaggctgacatgagagaatcgcttgagcccaggagttcgaggctgcagtgagctatgattgtgccactgcactccagtctgggcgacagaatgaaactgtctcaaaaagagtaaatgagaccccgagagttggagcagtgccccctagtacacagaagagacagggctttgacaccccctatctctggtgttcttggccctcaacacaggaaaagaaaaaagccatccaggaggaggaggagagagaccaggccttgcaggccaaggcgagcctgaccatcccgctggtgcccgagacggaagatgaccgcaagctggcggctctgctgaagttccacaccctggactgtgcgtaggaggccagggggaaaaggggacagggaggctcagagttgcctggagatggggggtcctcagccatgagtggactctggtctaccagagggcagttctggaccccctcccctgccgcccctgaaatgtcctctcctctcctctagcctacgaggacaagcagaaactcaagcggaccgagatcatcagccgctcctggttcccctctgcccccggatccgcctccagcagcaaggtcagcggcgtcctgaagaagctggcacagagccgcagaaccgcgcttgccacctcccccatcaccgtcggggacctgggcatcgtgcggcggaggtctcgggacgtcccggagagcccccagcatgcggccgacacccccaagtctggggaaccgcgggtaccagaggaggctgcccaggaccggcccatgtcccccggagactgtcctccggaaacaactgagacccccaagtgcagcagcccgagggggcaggaagggagccgtcaggacaagcccctgtcgccagcaggctcctcccaggaggcagctgacacccccgacacgcggcacccctgcagtctcggctcctccctcgtggcggactactccgactcggagagtgagtgagcgatccccatcctggagactggacccgctctagaggcccggacacacccaggaggcccctcacagactgcagacccccggctcgcccaccagccctgggagagctcagatgccgcatcctccccagaccgcgccttcctgcaaccgtggagttatttatttggtcctggtgagggtgtttgtgccttgtgagactccgtacattaaagacctgtctcttcttccctgtcttgggttgttagatggaccctggggctgcccccccacccccccaccttgaccaagcttggtaggcctctcatcagcaaatgctggtatagggtcatagctgtgaccacagacatggtccccttccagagtaacaagagtctcaaggtggtggtcccggttggccaggaatcaggacagacttcctggaggaggaggcatgggccaagtgtgaagggtgaaaagggggccaggaaccacacacacaaggccagggacaaggcacacggggtacccaggatgtgtgccagatgcagcaggggctggagcacacaggtgtgagctttttattatacccagcccaggggtggcccatggaaaagccccccgtgcatgttacttttggggtttttttgttttgtttttgagaccgagtcttgctctgtcacccaggctggagtgcagtggcgcgatctcggctcactgcaacctctgcctcctgggttcaagtgattcttctgcctcagcctcccgagcagctgggactacgggtgtgcgccaccacgcccagctaattttttgtatttttagtagagactgggtttcaccatgttggccaggctggtctcgaactcctgacctcaagtgatctgcccgactcggcctcccaaaatgctgggattccaggcgtgagccacagcgcctgtcctgcatgttacttttgaatgaaaccgagcagaaaatggcccagaaacagccttgcatccatcaaggggcacacgaccccccactacctccccctcaaccttggaagatcatttaacaaattctttggtttgaacacttgatgttaccttgccactggggatacatccctaactctagacagcaggttgttaaacacggggcctggtatccactaggcgtcccataaatgctgccacttttgtggttccgaggaggcggctcactccgttcgggcttggcaggagtcgtggagtgggttcggccacgtggaatccgcgtcctgggaacccgtggaatccgcgtcctgggaacccgtggaatccgcctcctgggaacccgtggaatccgcctcctgggaacccgtggaatccgcctcctgggaacccgtggaatccgcctcctgggaacccgtggaatccgcctcctgggaacccgtggaatcgggttggatgcgcatgtgcgtgtctctttttccgggggaggctccgcccacggccccgccccgctcccaagtgcgcgcggacccctagctccctctgagttgcgctgggcttggctgctgcaccatgaccctggaggcgatccgctactcgcggggctccctgcagatcctagaccagctgctgctgcccaagcagagccgctacgaggcggtgggctcggtgcaccaggcctgggaggccatccgcgccatgaaggtgcagcggggcggcggggcggcggggcggcggggcggcggggcggcggggcggcggggcggcggggcggcggggcggcggggcggccgggttggaggtgggagtgcgcccgcgcctgcagcttccgacgcccaaatccctgccccgcaggtgcggggcgccccggccatagccctggtgggctgtctcagcctcgccgtggagctgcaggcgggcgccgggggaccgggactcgccgcgctcgtggccttcgtgcgcgacaagctgagcttcctcgtcaccgcccggcccaccgctgtcaacatggcccgcgccgcccgcgacctggctgatgttgcagcccgggaggccgaacgggagggcgctacggaagaggcggtccgggagaggtacggggatctggtaccaggcacggcgctgagcaggaattatattgactctttttaagtacagtgacccactatacagatggggaaactgaggcacggcgaccttaagtcccttgtccagggccccacagatggggagactgaggcacggcgaccttaagtcccttgtccagggccccacagatggggcccagagtctagcctgggcagcctggccctgaaacctaactccttaatcgtgcctcccctgaatacacgcagccccttatccgcccttggaggccctttttagtatctccgtgttctcttggtttctgcttttgaggaactttttttcctgtcctggtccccttcctgccatctttttccccccacttcctttctgctccagccctccctgcaatgtcactttaccccaccaagctcgagcctgccttacagcctttgcacgtgccattggtgcgggccaggtatccatagcgccctcctccaccattctatatgatccagctcacccgctgctctctgttgcctgattctgccggcttttccttcattttattatctcttcatcagctggctcactcaccccagtgtcaactccacaggagcagagatttttgtcttgtttactgctgggtcataccggaactgcttggtaaacatgtctttgcatgaatgaacggagtgacacttcggtggccctggccgaagggtccaggccccacagcaatgagaggctttgagcaggagggctccaggacagcagcgttaggcagagaggaggcgttggcctgggccccgggtcctggtggctggtgctgaaaactccttgtcaccccagagtgatctgctgcaccgaggacatgctggagaaagacctcagagacaaccgaagcattggggacctaggagcccgccacctcctggagcgggtggcccccagcggtggcaaggtgactgtgctgacccactgtaacactggtgctctggccaccgctggctatggtacagccctaggtgagagggcctcctcagggggtaggggagggccttctaggaacttttttagatacaagagaaagaatcccaaacccaaaccactttatccacaaaaaaaatgggaaggtactagttctagtacggaaacacttatacagttggcttcaggtatggcaagatcaaggggctcaaccagtagcatcaggacctatctatctctgtgcttcagctctgccctccttcatcttcaggttccatgggctggcaggcggctgttagggtccaaatcatgaggaaaagagcctcctatactagaaaagtctccttgtatctcagggggtccactagggcacctgcccatcccagagcagtcattcgatgggccccgcctgagccatatgcctagagccagggcaggacgtggactccaggaggaactggggagaagggagtgagcagagaaagattaggtagctgtgaccaggagacagggggagtgggctgtagggggccaaggcagcagattccacttgaccctaaattcaccaggaaatttccctacctgcctgagtcccaccttcatccctgggaactgaggccttaatggaaagacctctgcctttgattcattcactcacccagcatttagtaagcacctgctgtggctcagacaccgccatttgctggggacgcagcagtgaacaaaacagacaaaatctctgctctcaggggtcccagggaagcagaaggaacagtcaacaggcaaaataagtacagtcatccttcaatatctgtgggggactggttccaggacctcccacagataccaaaatccatggatgctcaagtctctgatataaaaatgccatcatatttgcatgacctatgcacatccacatatatatatatatatatatatatatatatttttttttttttttttttttttttttttgagacagagtcttgctctgtcgcccaggctggtgcagtggcatgatctcagcttactacaacctctgcttcccgggttcaagagattctcatgcctcagcctcctgagtgtctgggattataggcgtgagccactacgcccagctaatttttatatttttagtagggacggggtttcacgacattggccaggctggtctcgaacttctgaccttaggcggtccgccagcctcggcctcccaaagtgctgggattacagacgtaagccacagtgcccagcccacccctatattttaaatcgtgtctagattgcatatcatagctagtcccatgtaaatactatgtaaattgttgttactggctaggtgtagtggcggtgcaggcctgtaatcaggaggctggggtgggaggattgcttgaactcagaagttctagaccagcctttgcaacacagcaagaccctgtctctatttttaagcctgtaatgccagcacttcgggaggccaaggtgggcggatcgcttgagctcaggggttcaaaaccagcctgggcttcatggcaaaaccccatctctacaaaaaatactaaaattagctgggtgtagtggtatgcacctgtggtcccacctattcgggaggggactgagatgggaggattgctttttatttatttatttattttggagacagagtcttgctctgtcacccaggctggagtgccatggcacgaccttggctccttgcaacctctgcctcctgggttccagcgattcttttcaagtattttctttctttcctttttttttttttttttttttttttgagacagagtcttgcactgttgcccaggctggagtgcagtggcgcagtctcggctcactgcaagctccgcctcccaggttcacgccattctcctgcctccgcctctcgagtagctgggactacaggtgcccgccaccacgcccggctaattttttgaacttttagtagagatggggtttcaccgtgttagccaggatggtctcgatctcctgacctcgtgatccatctgcctaggcctcccaaagtgctgggattacaggcgtgagccaccacgcccagcccaaatattttcaatccacatggttgagtccatggatggagaacccatagaaaaggggggctgcctgtacacatgaggtgttagaaggtgataaatgctaaggacagagagcaggaaactgaaagtgtggggattgctatgcaaaactgatatatcagggaaggcttcaccgagaaggtgtcctttaaacagacgtgaaacggagctatgcgagcattgggaagagcataccaggcagagggaactgccactgcgagggcccctgggcgggactgtgctcggtaagcctttggcaatccacgcccagactaggagcctgcacccctaaccaatggaccaccctgtctgtttgcccctccccggggccttctcctggtgggtggggcccccgcaggtgtgattcgctcactgcacagcctgggccgcctggagcatgccttctgcacagagacccggccctacaaccagggagcccggctgacggcctttgagctggtctatgagcagatccccgccacccttatcaccgacagcatggtggctgctgccatggcccataggggcgtgtcaggtaagcagacggtaagccctgggggcggggctctggagcatggggccaggtaatgacccccaacttctcatacgccccctccccagctgtggtcgtgggagctgaccgcgtggttgccaacggcgacacagccaacaaggtgggcacctaccagctggccattgtcgccaagcaccatggcattcccttctacgtggctgcccccagctcttcatgtgacctccgtctggagaccggcaaggagatcattattgaagagcgaccgggccaggagctgaccgatgttaatggggtccggattgcagcacctggtaagctgccccctcagaaaggggacaccccagctcctgggcacttcatggaggcaggtgatatgcaggtccttgtcatccttctggaacatacacagctcctacaagccactttttcttttttcttttttttgagatggagtcttgctctgtccctcaggctagagtgcagtggcacgatctgggctccctgcaacctccacctcccgggctcaagcagttctcctgcctcagccccccaagtagctgggactataggtgggtgccaccacgcctggctaatttttgtatttttagtagagatgaggtttcaacatgtggaccaggctatttattaactactgacctcaagcaatcagcctgcctctgcctcccaaagcgctaggattacaggtgtgagccacagcacgcctggcccaagccacttcttctaacaggtgcatcctggaggtcagatccaatgttggaatttacaactaaccggttatatgaatgatcttgagtaactgtcttgctattctccacttaggttttcttaagaggaaataagaatatctggctggccacgtgtttgtaaagaaaaaccaagacggccaggcgaggtggctcacacctgtaatcccagcactttgggaggccgaggcgggcagatcacaaggtcaggagttcgagaccagcctggtcaacatagtgaaaccccgtctctactaaaaatacaaaaattagccggacatggtggcacccgcctgtagtcccaactactcaggaggctgagggaggagaatcacttgaacctgagaggcggaggttgtggtgagctgagattacaccattgcactccagcctgggcaacagagtgagattctgtctcaaaaaaaaaaaagaaaagaaaaagcaagatatttctacacttatttttatttgtttattttcatagagatagggtctcgctatgttccccaggctggtctcaaactcctggcctcaagcgatcctcctgcctcagcctcccaaagcactgagattacaggtgtgagctcccatgcctagctgcaagacttttcttagctgcctatacttcctggctgtgcaaccgttagcaagttccctaaattctctaattccctaagatcctcactggtcctatctgtaaaatgggctatggctagaacctgctgcataaacccaagggcggtcagtgaattaacccacaggacatttagatcaatgactggccctttaaatagttcatgcactcagatgccgtggctcacgcctataatcccaacactttgggaggcggaggtgggcggatcacttgaggtcaggcgttccagaccagcctagccaacagagcgaaaccacgtctctactaaaaaaatataaaaattagccaggcgtggtggcacatgcctgtagtcccatctacttgggaagctgaggcatgagaattgcttgaacctaggacgcagaggttgcagtaagttgagactgcaccactgcactccagtctgggtgacagagcgaaactccatctcaaaaataaaaaaaaaggccgagcgctgtggctcacgcctgtaatcccagcactttgggaagccgaggcgggcggatcacctgaggtcgggagttcaagaccagcctgaccaacatggagaaaccctgcctctactaaaaatacaaaattagccgggcgtggtggcacatgcctgtaaccccagctactcaggaggctgaggcaggagaattgcttgaacccgggaggcggaggttgcaatgagccaagatagcgccacagcactccagcctgggcaacaagagtgaaactccatctcaaagaaaaaaaagaaaaaacagttcatgaaatattagcatgaaccaatattagcattatggggccaggtaaaatggctcacacctgaaatcccagtattttgggaggctgaggtgggaggatcacttgagctcaggagttcaagaccagcctgggcaacattgccagaccacaatctctaaaaaaattgttttgccaggtgtggtggttcatgattgtaaccccagcactttgggaggctgaggcgggcggatcacctgaggtcaggggttcgagaccagcctggccaatgtggtgaaaccccgtctctactaaaaatacaaaaaaaaaaaacgttagctgggcgaggtggcaggcgcctgtaatcccaactacttgggaggctgaggcaggagaatcgcttgaacctgggaggcacaggttgcagtgagttgagatcatgtcactgcactccagcctaggtgacaagagcaaaactccatctcaaaaaaacaaaaaaacagctagacatgatggtgcacatctgtggtcccagctgctcaggaggctgcagcaggagaatcgtttgaatccaagaggcagaggttacactgagccaagatcgcaccactgtactacagcctgggtgacacaacgagactctgtgtcaaaaataataataataattaaaaataaaactaaaaaaataagtgggatgggccaggtgcggtggctcacgcctgtaatcccagcactttgggaggccgaggcgggcagatcacctgaggtcgggagtttgagaccagcctgaccaacatggaaaaacctcgtctctactaaaaatactggctgggcatggtggtgcatgcctgtaatcccagctactcgggaggctgaggcaggagaattgcttgaaacctgggaggtggaggttgcagtgaaccaagatcgtgccattgcactccagcctgggcaacaagagcaaaactacatctcacaaaaaataaaaaaataagtggcatagatgtgtataggactttgaatttttcttggggactgacattctaggggcagtggcgagtctaaacttactattgagtacaatgtccatgcctgcatgtacttttggggtgagaatcctcaggttctcaaggactccccaactccaagaaccactgtggtagaaacagatgactacaacctgagaactttcacagaagcaaattcttgcctccttgcctcccctctctcccctgcagggattggagtttggaatcctgccttcgatgtcaccccccacgacctcatcactggtggcatcatcacagaactgggggtctttgcccctgaggagctccggacagccctaaccaccaccatctcttccagggatggaaccctagatggaccccagatgtaaccaactcagctctccctagcctgcctctctaggtttttcaatacatttcttgaatggctacccaaaagctgaccgtccagcccctgaccacacttgttcctagtgcagggagctcagacagggccttccatctagagcccagcacctagagccaggctgcccagattcaaatcctgactccgccacttttcccactgtatgatcttgggcaagtcacttcacctctctgtgccttggtttcctcatttataaaatgtggataacaggccgggcgcagtggctcacacctgtaatcccagcactttgggaggccgaggcaggtggatcacaagatcaggagattgagaccatcctggctaacatggtgaaaccccatctctactaaaaatacaaaaaattagccgggtgtggtggtgggcacctgcagtcccagctacttgggaggctgaggcaggagaatggcgtgaaactgggaggcagagcttgcagtgagccgagatagcgccactgcactccagcctgggcaacagagcgagactccgtctcaaaaataaatataattaattaattatttaattaaaaaaataaaaaataaatgtggataatactagtacctccctcttaaggtcagggctggagctagggtgacatctccagggcagaattttaagaggacaccaaaaaagctcagcaaccaagataaaaaatattttaaagcaatattttgttttgggttttttttttttgagatcaagtatcactcgttacccaggctggaatgtagaggcgagatctcagctcactgaaacctgtgcctccccggttcaagcgattctcctgccacagcctcctgagtagctgggattacaggcatgcgccaccatgcccagctaatttttctatttttagtagagacatgatttcaccatgttggccaggctggtctcgaactcctgactcaaatgatccccctgcctcagcctcccaaagtgctgggactacaggcatgagccactgtgcctgaccttacagcagtattttttaaaaatcaaaattaatgcaaaaatccatgatgaggccaggcttggtggctcatgcctgtaattccagcactttgggaggatcccttgagcccaggtgtttgagaccagtttgggtaacataggaagagcttgtctctacaaacaaaaatttaaaaacaatgagctgggcatggaactcacacctctagccccagctactcaggctgaagtgggaggatggcttgagcccaggagttcaaggatgcagtgtgctttgattgcactactgcacttcaccctaagcaacagagtgagaccccatctctttaaaaaaaaaaaaaaatccatgatgaacaaaacaagtatttgtttgagacggggtctcgctctgtcgcccaggctggagtacagtggtgccatctcagctcactgcaacctccgccttctgggttcaagcgactctcctgcctcagcctcccgagtagctgggattacaggagcctggcactatgcctggctaatttttgtatttttattggagacaccatgttagtcgtggctggtctccaactcctgacctcgggtgatccgcgccccgcggcctccgaaagtgctgggattacaagcgtgagccaccgtgcccggcctaaataaaattttgaagaggctagaaccccgcacttgtgccttgagcttactgacctcaacaccctggttccactaaaactttatttacaaaattatgctgccggtctgcaggatgtagtttaacaatttgattattttggatattaaaatattttttaagtcttgaaaatattgtttactattaccaaagtttttgaaccttcttaaattctgtaccagaggtgagtgccacaccctaacctagtctgagtttttatgtgtaaagatcataaaacgttgtaagttttctaaaacacataagctctcaataaacgttagcttatcattgtcaccgttttgttcgtaatgtttgaaaactccaactgtgatccactacactacccttgtgggatgctgtctctttaactctgtgccacgttgtatcccgtgagttcttgcgtttttccgccccgctgtatcccatggttccctgtgccttccggctacgactgctcacagtcccgcctcttccgctgcgtgccggaccatggcgcaggggcagcgcaagtttcaggcgcacaaacccgcaaagagtaagacggcagcggcagcctctgaaaagaatcggggcccaagaaaaggcggtaaggagcggcccggggacttgggggcgaggtggacccccggcttcccggcctcacgtgagcacatctttccccaggtcgtgttatcgctcccaagaaggcgcgcgtcgtgcagcagcaaaagctcaagaaggtgtgcgggggcgagagatggagcccggagggcggcgagtagcgaggggtggaacccggaggacggcgaggggggatgggtggagcccggggatcagtgaggggagagggtggatcctggggacgagctaggagcgaggggatagagccaggggccgcgttaggagcgaaggatggagcccggggcgcagagaggggtaagaggtggaagctggcgagggataggggctgggggacgtgctagggacgagagatgaaatctggaggccggcgagggaaggagcacagggatcggcaaagggcaagggatgaggcctggaggactcccagctctgtgggcctcccttttcttccttgtgcaaggggtgcaggaacaccacttaccacttcaaaagggcctcgtagaagcaagacctgcggcccaaaaagggttccaataacgtcagcctcttgctgttactgttttctttaattgaactcaggaagacagcgaggtgacatgggaagggaattgaaagcccagctttgtaaacctagaacagcagagggctcaaagaagtgtgagggtgcgttggttatcgtcatttttttttgagtcagggtctcactgttgcccaggctggagtgcagtggccccattatagctcactgcagcctcagcctcctggacttaggcaatctttccgtctcagcctctcgagtaggtagaattgcaggtgctcgccaatacgcggctaattttattttttttgtatttttggtagagacaggtttcactatgctgctcgggctggtcttgaactcctggcctcaaggcatcctcccgcctctgcctcccaaaatgctgggattacaggcgtgagccaccctatggttgtttttaagtgcaacatttatatgtagatgggtaaggttgagcttgtaaagaagttggaaggagatttaaaactggttttggtgggagtcaaacctgggtttgaattgtactccacagtaaacagccctgtgatcttgagcaaattgtttcgtcaccccagagtgtcggttttctcagaactgggtacccactggcccgcttacctccgtggagtggggaatctcatggtcaccttgcactcagcatgtccaaaaccaaattcctgatcctcccttcccattctgccctcctccccctgtgatcacttccttccagatgccataggtcatccttgaatccctcctttctctcacatcccggtctcatcccatttgttttgttttgtttttttgagatggagtctcgctctgtcgcccaggctggagtgcagttgagtgatcttggcttaggtgcaacctctgcctcctgggttcaagcgattttcctccctcagcctcccgagtaactgggattacaggcctgcaccaccacaccgggctaatttttttttttttttttttttttttttgtaattttagtagagatggggtttcactatgttggccaggctggtctcgaactcctgacctcatgatctacccgcctcggcctcccaaagtgctgggattacaggcatgagccactgtgctcgcccctattttgcccttagaatcaatccagaatccacccgcctcccatcttcttggcccctacctggtcccacccacatcatttcccaccgggaccagtgcagccaccttctcccttgtctcctggatcccacctggtcctctcacagaagccagagggtgcccatgagcacctgagtcggttccctccctccttggctcagaatcctccatggcttccacctcacccaggaaaaaggtccagtcctcactcagccacaaggccctgtagaatctgccctcgtctccttccaccctctcctctgctaactccctctagccttactggcccctgacccctccttcccggagcccttcctgggctccttgtcccacctgagaacttttgcactggctgtttcctctgcctggattcctctcccaataatacacactgctcccttcttccaactctcttcaaagaggcctgccttgatggtgacctgtacccatccctcctcactcctgtttcctctttgccatagcagcgcttaccatcctttaacagtgtaacatattacgctactgatgcttatattgtcccggtacatgcactgaattccagctccatgacccctgcatccaggcacctggttagctgtcccgatgctggtgatcgtggtcattggaactgtttttgttttttgtttttgttttgagatagagtttcgttcttgttgcccaggctggagtgcagtggtgcggtctgggctcactgcaacctctgcctcctgggttcaagcaattctcctgcctcagcctctcgagtagctgggattacaggcgcccgccaccacacctggctactttttgtgtttttagtagagattgggtttcaccatgttggccagcctggtctagagctcctgacctcaggtgatatgcctgccttggcctcccaaggtgctgggattacagccactgcacccagccggaacttttttttttttctttgagacggtctcacgctgtcccccaggctgcagtgtagtggaacgatcatagctcactgcagcctggacctcctgggctcgaccacccaaacagctgagacgagaggcacgcaccagcacaccgtgctaattctttcttttagtacagatgcagtctcgctgtgttgcccaggctggtctcgagttcctgggctcaagtgatcttcctgcctcagcctcgcaaagtgctgggatcacaggcttgagccaccacacccagtccgtcggaactcagaatggcagggcagaggcagtctgggaaaggcgactgagccaccagtttggggttcacactgctggttttgccccacgcttgtgccttacttgccagctcccttgcccactcttcagatcctcagcttgccgtctgcaaagcagagatgacctggggcagaggaggctgcccttctagaggctgggaccagaggctgtgggcacgccggatcccatgcagtttagggacctgggcaaccagtgcctcctggctgcagcagactgtttccccatccataaaatgggcatgagcagaggtttagaagccaaggtgcagaagtgaggatttttgtgtgtgtggaggccccggagagtgcaggacttaaaccccagccaccagacccacagtcaggtgcggttcgaggggatagttgctgatctagccccctgcgagctctagccaggaagagggtgactggtcaggccctctctcagccccaggtcacaatctgactgccccgtgcttctccctcagaacctagaagtcggaatccggaagaagatcgaacatgacgtggtgatgaaagccagcagcagcctgcccaagaagctggcactgctgaaggccccagccaagaagaaaggggcagctgccgccacctcctccaagacaccttcctgaggacgctggccccagtgcaggccaacatcccaccccctacctccatatgggaccttgcaagtcatcccacaggctgcactgtcaggaagaggaccctgtcccccagcactgggcttcacctagaacttcagtgggggccaagggtgctgagaacccagcaatgaccaggaagatacagtcactaacttcatctgtccccgtgccccttcccaggtcctgcctccacaggtttaacccagaacaataaacctggctttgtcatccctcttgcagtcctgtgttcgggtgagcaggccaggtgagcccacaagtctccatgagtgacgtggcctggcgtgctccaccccaccccaccgcctttagcaaccatgtgcccaggggacagctgggcttctacacctctggccctgagcctgagagccgggaaagagtcttttctccatttaaccccgggtgactcactccctggccagtcctcacccctggggacacaaccagagtcaagctggacatcagtaggtcagatgccacctcacaggaccaaggtgccgattaaaccggaatacattcagaaaccacgtggtactacctggttaaagagtgccaactgtaaggtagtcaggacagccagtggtagcactacctatgagccaggccgcactgtcgcccaggctggagtgcagtggcacaatcatagctcacttcagcctccatcttccaggctcaagcaatcctcccacctcagcctcccaagtagttggaactacaggcatgcactgccatgcccagctgatttattgctttttgtagatgtggggtcttgctaagttgcccaggctggtctcaacttcatggcctccagcagtcgtcctgccttggcctcccagagtgctaggattacaggtgtgatccaccatgccccacaagttctaatgcgttatacatgtcatctagcaggatgccctgttcaggtcctgcataatgttccagagtggaattgatcccgtagttggcagagtcctgatccgtgctctcagctgaccctctggctacctgtcactgtcaagaccagaattcacttctgcccatcctggagttcctccacctccaaattgtttgagtctgttgtgccacacagtacctatggaatattctgggatctctggcctgataaccttccttttctcccttcactggatccaggtcaaggtcacagcacagggaaaagttgggctgtagtctgggtgatactgaactgctgtctttggggagtggtacctgtgcatacagtcagcttctaccctgagacggggtggggtgactggttccctagtggcttatccactcctggccacctcacctaccaaggagacagaggtgctgggtcaccagcagctacccccaaaccccatctcaagtgtgttttctgggttccacacagtgacagtcaagattttgccttttttttttttttttcagacagagtcttgctctggagtgcagtggcatgatcgtggctcactgttacctctgtgtcccaggctcaagcgatcctgacacctcagcctcccaagtagctgggattataggcatgtgccaccacacccagataatttttgtatttttagtagacacggggtttcaccatgttgaccaggctggtctcaaactcctgacctcaagtgatccacccacctcagcctcccaaaatgctgggattacaggctataaagaggggaaaaacagttcagtggttcttcagtaagttcattgtggagctaccgtatgacccagcaattccgctcctaggtatattcccagaagaatggaagacatgttcacttgtagatttgcatatccatgtaaatagcagcactgctcacaatagcgaaaaggtggacacaggccaggcgcagtggctcatgcctgtaatcccagcactttgagaggctgaggcaggccgatcacgaggtcgagttcaagacctgcctgaccaacagggtgaaaccccgtctctattaaaaacacaaaaattaggccaggtgtggtggcttacacctgtcatcccagcactttgggaggccgaagcgggtggatcatgaggtcaggagattgagaccatcctggctaacatggtgaaaccctgtctctactaaaaatacaaaaaattagccaggtgtggtggctggcgcctgtactcccagctacctgggaggctgaggcaggagaatggcgtgaacctgggaggcggagcttgcagtgagccgagatcgcggcactgcactccagcctgggcaacacagcaagactccgtctcaaaaaaaaacaaaaattagccgggcgtggtggtacacgcctgtaatatcagctactcaggaggctgacacaggagaatcgcttgaacccgggagaccgaggttgcagtgagcggaaatcgtgccattgcactcgagcctgggcgacagagtgagactccgtctcaaaaaaaaaaagaaaaaatggacacagcccacacatccatctacggatgaagggataaactgaggtctatccttcaatagaatattcacccttggggaggaaggccaagtgcagtggctcatgcctgtcatcccaactacttaggaggctgaggcaggaggatcacttgagcctgggagttgaaggcagcagtgagctatgatctcaccactgcactccagcctgggtgacaaagccagatcccgactcttaaaaaggaatgaagcactgatccaggaaactacaagaatgagcctgaaaataaactaagtgaacaaagcgagacacaaaaggctacatcttgaatcgtcccacttacatgaaatgtcccaaacaggcaaatccatggggggagaaagcagatgagtgattgccaggggctgagggagcgggaatggggtttcttttcaaggggtatgaaaatgtcctggagtcagaagtgattgtacaacattgtgattatactgaactgtgcactttaaaatggtgcattaggccgggcgtggtggctcataactgtaatcccagaactttggggggccaaggccggtggatcacttgaggccaggagttcgagaccagcatggccaatatggcaaaaccccaactctactaaaaatacaaaaattagccgggtatggtggtgagtgcctgtaatcccagccacttgggaggctgaggcaggagaatcacttgaacctgggaggcggaggttgcagtgagccaagatggtgccattgcatgtcagcctgggtgacagagtgagacatggtctcaaaaaataattaaaataaaatggtgaattttagcaccaccacccctccccgcccaaacatgcagagagaaatttcattaaaaagtcctaacttagcatcttgaaaaatcaggaatcagggcagtggaagccgcacgcatgagatggaaagactgagtagtctggcgtttcccaagctgccaggaaggccccgccctcattgtttctggagggggagggaggggctggaggatgaatgaggcccagatctcagactgagggataagggtagctctttcctttctgggcttccctttcacagccaatccccggcctctgttcagggctggggattggctgttccagcttccagggcacacatccttgagccccatctagggaacctggtttctctggctgtctgcccacctcaggcagtaattgacttctgcccttggttttgttttatttttttttttattttttatttttttgagatggagtctccctctgtcacccaggctggagtgcagtggcgtgatctcggctcactacaacctccgcctcccgggttcaagtgattatcctgcctcagcatcccgagtaactgggactataggcacacaccaccacactcgggtaatttttttttagtagagatggggtttcaccatgttggccaggctggtctcgaactcctgacctctggtgatctgcccacctcggcctcccaaagtgctgggattacagatgtgagacactgggcatgagctgtttttttttttgttttgttttttgtttttttgttttgggagatggggtctcactatgttgtccaggctggtctcaaacacttctacctcaagcgatcttcctgccttggcctcccaaagtgctgggattacaggcatgagccacccagctgacttaaggcctttcaggtagggccacttggctcattcagtatttttttttttcagagcaggaatgaaagtttattaaaaagccttaaaacaataaggaaaggaaagaaggaaagtataacttagaagagggccagacgggtaacttgagaaaccaagttctccttgttcagtacttattgtgattacttttatatttttttagagacagcgtcttgctgtgtcgcgactgcagtggtgagatcataagtcactgcaaactcaaactcctacactcaagtgatcctcccacctcagcctccctagtagttggaaccacaggcatgcaccaccacgcccagctaatttttttattttccgtagagacagggtctccctatgttgccccgactgattttggcctcaagccatcgtcccacttcagcctcccaaactgctgggattgtagacatgagccaccacacccagctattgtgactacttcatgccaacctctcttctaggcagaactaagaactaacattcaggctggccgtgatggttcacgcctctaatcccagcactttgggtggctgaggcaggtggatcacttgaggtcaggacttcaagaccagcctggccaacatggtgaaaccctgtctctactaaaaatacaaaaattggccggcatcgtggcacacacctataatcccagctactcaggaggctgaggcaggagaatcgcttgaacccaggaggcagaggttgcagtgagctgagatcatgctactgcactccacctgggcggcagagcaagactctgtctcaaaaacacaaaacaaaacaaacctgacattccagtgacaacagaaaaaagagacaacaccaagtttgtatccccttcccatccaggccacagtcctccctgcctttgtgcccacagttccttcccccgagacatcacctcagagaagccttctttgtcccctgcccccagaagtggcctgtttgattgtcttcttagccagggtcactttctgttactttcctctgtttctactttgcttctcaaggaccccgactctgttcggggctgtgtctcaagcaactagaacagctcacaataggcactcgatgagcaggtgtttattgaaggaacggttccttctaaaaccttttgtttcagtgaatgagttatgattattcaatggttcattcagccccttagctataaacaatacacccttcctaaacaatacaccctctccggagtacctgattcatatcattgtctttgaactattttacaactctgtaagttgtgaaaattgatagcaatacaaaatagttcttatctacagacatgcaaatgtcatatcctgtccagcctagaggttcagttgacaacgcttattcccctgtggaaaaccgaatttgcctacattcacacctttgcttcaacagcttgatttctaaagtgtctttttcaaggtcaggcaccctggctcacacctgcagtcccagcactttgtgtgtgtctgtgtgtggtttttgttaatgatgatgatgttttttagatcgtctccctctgtcacccaggctggagtgcaatggcatgatctcagctcagggcaacctccgcctcctgggttcaagagattttcctgccccagcctcccgagtagctaggactacaggcgcgcgccaccacacccgcctaatttttgtatttttagtagagatggggattcaccatgttgcccagactggtctcgaactcctgacctcaagtgatccgcctaccttggcttcccaaagtgtgggattacaggtgtgagccactgcgcccagcctaatcccagcactttgggaggcggaggtgggcagattgctcgaggccaggagttcaagaccagcctgggcaacatagcaagaccctatctctgcaaaacatttttaaaaattagctgggtgtggtggggcatgcctggagtcccagctactccagagactgaactgggagggtcacttgagcacgggaggttggggctgcaatgagcccaaatcgcaccactgcactccagcttgggcgatgcagcaaggccccatctcaaaaacaaaagtgtctttttcagactctcttgaacataacatctgcctgtttcccacatcagtgaaattaagagaaaaacaaggctaggtgtggtggctcacatctgtaatcccagcactttgggaggccaaggcaggcagatcacctgaggttaggagttcgagaccaacctggccaacatggtgaaaccccgtctctactaaaaataaatagattagccgggcgtggtggcaggcacctatagtcccagctactcatgaggctgaggcagaagaatcgcttgaacccgggaaacgaaagttgcagtaagccaagatcgtgccattgcactccagcctgggcaacagagcaagctctgtctcaaaaaaaaaaagaaagaaaaaaagaagagacaaaaaaacacaaaaaagaaacaaaaaaaatttctgacctggcgaacaggaagaaaaaaacattttagcacccattcatctttatatgttaagggagtggtgattttgccaccttcaaaaaattagcttccggtctttctatctggaatcagaaaggcaagggccaggacggggtgggctctgggccaggacggggtgggctctgggtgccatctggcaccggagttggacaccaggaggcgcctctaaccggggttaaatccacccgcaggctggtggcgtctcgaccagcccaggaatcctgcattctggctccctttgtgcctctgacgccagccccttcgaggagcaccccaggggcaaggaagggctttcaggcactgcaggtatggggtctggaatgtgcactcacccattcccccttcacctctcccctcagggctccccaaacagcctcattttccccttcactttcctgggtgactttcccctcctgcactcccccaagccctgattagtgctggagccaggagccccagactccggaagaacccacaccttgagttctttgccaggttctgccactttttgactgtgtgaccgtcaagtcccttcacctttctgagtctcagcctggggccgtggctcatgcctgtaatctcagcactttgggaggctgaggccagcagatcacttgaggtcaggagttcaacaccagcctggccaacatgaagaaacctcgtctctaccaaaagtacaaaaattagccgggtgtggtggtgcgcgcctgtaatcccagctactcgggaggctgaggcaggagaatcgcttgaacccgggaggcggaggttgtagtgagccgagatcacgtcactgcaccccaccccagcctgggcgactgagtgagactctgtctcaaaaaacaaaacaaaacaaaacaaaacaaaacgggaggctgagacaggagaatcacttgaacctgggaggtgaaggttgtagtgagctgagatcatgtcactgcaccccaccccagcctgggcaactgagactctgtctcaaaaaaaaaaaaaattaaaacctttctgagcctcagtttctctgtctgttacattgggatccccactccccctcagtgtgagttcaggagcctaagaataagggacataccaatttttttttttttttttttttttgagatggagtctcgctctgtcgcccagactggagtgcagtggtgcgatctcgactcactgcaagctccgcctcccggttcacaccattctcctgcctcagcctccggagtggctgggactgcaggcacccgccaccatgcccggctaattttttgtgttttttagtagagacggggtttcaccgtgttagccaggacggtctcaactcctgacctcatgatccgcccgcctcggcctcccaaagtgctgggattacgggcgtgagccaccgcgcctggcgggacataccaatgtgactaggagctgcgcttgtgtgctgggggcagagcagtgggaacccaagtcctgccatcccccgtcctctctgtccctccctagctcccctctcccagggacagaggcgtcattaaatgtggcttttcctgacagttattggccgggcgctgtggctcacgcctataatcccagcactttgggaggccgaggcaggtggatcacctgaggtcaggaattcaagaccagcctggccaatatggcgaaaccccatctctactaaaaatacaaaaattagccaggcgtggtggcgggcgcctgtagtcccagctactcggggggctgaggcaggagaatcgcttgaacctgggaggcaaaggttgtagtgagccgagatcacgtcactgcaccccaccccagcctgggcgactgagtgagactctgtctcaaaaaaaaaaaaaaattaaagcctttctgagcctcagtttctctgtctgttacattgggatccccactccctctcagtgtgaattcaggagcctaaggataagggacataccaatttctttctttttttttttttttgagacggagtcttgctctgtcacccaggctggagtgcagtggcgcgatctcgactcactgcaagctccgcctcccgggttcacaccattcttctgcctcagcctcccgagtagctgggaccacaggcgcccgccaccatgcccagctaattttgtcttttttagtagagacggggtttcaccatgttagccaggatggtctcgatctcctgacctcgtgatccgcccgccttggctggcggcggggattacagtgctggcggcggggattacagtgctgggattacaggcgtgtaatcccattacagggaggctgaggcaggagaatccagcttgaacccaggaggttcaagctgcttgaactcctgcttgaacccaggaggcagaggttgcagtgagtcaagatccgccactgcactccagcctgggcaacagagcaagcgagactccgtctcaaaaaaaaaatactttgggaggctgaggcgagcggatcacctgaggttaggagtttgagacctgcctgaccaacatggagaaaccctgcctctactaaaaatacaaaataagcctggcgtggtggcacatgcctgtaatcccagccactcaggaggctgaggcaggagaatcacttgaacccaggaggtggaggtttcggtgagccaacatcgcgccattgcactccagcctggcctgggcaacaagagcgaaactccgtctcaaaaaaaaacaacaacaaaaaaaaaaaacaaaaaaacacagttattcttgcctaagcctttctctcctgcctccaccttcccccgcctcgacctggcacgaccacttctcctggcagggccctgacactttgcccatgaacttctgtttcaaaaagaaagaaaagaaatgcaagaaggaaatcttgccagctgcgcatgccggaggggctgcgtcgtcgcgaccaggaagcaagcgaagcctacccagctggtttcctgcctgagtcaacggtggctgggggtgctgcagggggctggcagaagggagggaccctcagaaagctagggtggagatatccacgagctgggggtccttgtctccaccttcatctgagcccccagggtagccccatcttccacgggttgagagcacacgtggtttggggtcaggagctgtacatgcctagacagtgagctcacgctgggcgcgggcaggatcaatctggcttccatttccccaaagcccaagcttgctggctttactgagaaggaaggacgcaggtggttggaactacccccatcaaactcctttttttcctcttttttttttttttttttttttttgagacaagagtcttgctatattgtccaggctggtcttgaactccgaggcataagcgatcctacctcctctgcctttcaagtagatgggactggctgggcacagcccctcacacctgtaatcccagcactttgggaagccaaggtggaaggatcgatcgcttgagcccaggagctcaagatcagcctggccaacatagtgagaccccatctcttttaaaaaaattgttttaaaaaattagccaggcatagtgctacacgcctgcagtctcagctactcacgaggctgaggcaggtggaccacttgagcccgggaggttgaagctgcagcaagtcgtgatcacgccattgcacttcaacccacgcaacagagcaagaccctgtctcaaaacagggttagctgtttgaaggcagggcgtagtggctcccacctgtaatcccagcactttgggaggcggaggagcgtggatgacctgatgtcaggagttcgagaccagcctggccaacatggtgaaaccccatctctactaaaaatacaaaaattagccgggtttgccctgtgatcccagctactcaggaggctgaggcaggagaatagcttgaacccgggaggcggaggctgtagtgagctgagatcgctccactgcactccagcctgagcaacagagcaagactctctctctgtctgtctctctctctatatatatatgttagtatctattgttagagaattaaataagacattctcaccctctgataccccattctgtgttcctcctaaagtctacccactggcctagagtgacttctctgattcagcattacaggacgtacattggagccctttcaaagctagacttagccgacatagccacgtatcagatgctgaagagggctgctgggaaaagccagccctgaggtcctgtttgcaaggggagcaccagaaagacatgcttttcatttttgttctgtcttggtttgttttttcttgagacgaggtctggctctgtcgcccagactggagtgcagtggcgcaatcatggctcactgcagcctcaaccttctaggctcaagcaatcctcccaccacagcttcctgagtagctgggactacagatgcgcaccaccacacccggttaattaaaaaaaaaaaaaatttaggccaggcacagtggctcacacctgtaatcccagcactttgggaggccgaggcaggcagataacctgaggtcaggagtttgagaccagcctggccaacatggtgaaaccccgtctctagtaaaaatacaaaaattttctgggtatagtggcgctcgtctatagtcccagttactcgggaggctgaaacaggagaattgcttgaccctaggatgtggagcttgcagtgacctgagactcgccaccgcactccagcctgggcaacagagcaagactccatttcaaaataaataaataaactaataaataaataggccaggtgcagtggctcacgcctgtaatcccagcactttgggaggccgaggtgggtggatcacaacgtcaggagttcgagaccagcctggctaacacggtgaaacaccgtctctattaaaaatacaaaaaaattagcccggtgtggtggcacatgcctgtaaacccagctactcgggaggctgaggcaggagaatcacttaaacccgggaggcagaggttacagtgagccaagatcgcaccactgcactccagcctgggctacacagcaagactccatctcaaaaattaaaaaataaataaataaataaacatcaaataaatttttagaaatgggggaggggggtctcgctatattgcccagcctggtcttgaactcctggactcaagcaatcctcccacttcagcttccccaagtgctgggattacaggtgtgagccactgcacccggccatcctttgcttgaactcctccctgtgtctcctctgaccccagttactcactccccataagtctaaatcctatgcaaggagataccccagtaagtctagggctccaaagcagcccccagttgacttccactagtccagctcctactgctgggtgacctcaagcaagtggctcagcctctccaagcctcagtttcctcctctaagaaatggaagtgacagtccccactttgcaacactgtttgacggcttatacttcagcgtttatctccatagctacgggcattgcatgagcactcaacacattattattattgctatttctgttgctatcactgtggcaggctgtggtttctcaagacgggcactgtctaacagaaatacaactcaagccggatgtggtggctcacgcctgtaatcccagcaatctgggaggccgaggcggaaggattgcttgaactcaggaattcaagaccatgggcaacacaacaagacttcctctctatcaaaattcaaaaaaattggccaggcatgctggctcacacctgtaatcctcacactttgggaagcagaagcaggcaaatcacctgaggtcgggagttccagaccagcctgaccaacatggagaaaccccgtctctactaaaaatacaaaaattagaagggcatggtggcgggtgcctgtaatcccagctacttgggaggcgaggcaggagaatcgcttgaacccgggaggtggaggctgcggtgagccgagatcacgccattgcactccagcctgggcaacaaaagcgaaactccgtctcaaaaaaaaaaaaaaattaaccagggatggtggctcacgcctgtaatcccaggactttgggaggccaaggcaggtggatcacttgaagtcaggagttcgagaccagcctggccaacatggtaaaaccccatctctattaaaaatgcaaaaattggccgggtgtggtgacgcacacctatagtcccagctacttgggaggctgaggcaggagacttgcttgaacccaaggttcaagtgaggttgcagtgagccgagatcgcgccactgcactccagcctggtgacagagcgagactccggctcaaaaaaaaaaaaaacaaaaaacaaaaaaggaaaaaaagaaagaaatacaacttgagacacatatatacttttatttatttatttatttacttatttatttttgagatagcatctcactgtgttgcctagcccagtcacaaactcctggactcaagtgctgctctccgctcagcctcccaaagtgctgtgtttacagggaccaaccactgtgccctgccacatatgttattttattttattttactttatttatttattttatatatatatatatatattttttttgagatggagtctcactctttcacccaggctggagtgcagtggtgcgatgttggctcactgcaacctctgcctcccaggttcaagcgattctcctccctcagcctcccacgtagctgggattacaggcacgcaccaccatgcctggctaattttttgtatttttagtagagacaggtttcaccatgttggccaagctggtctttttttttttttttctttttttgagacggagtctcgttctgtcgcccaggctggagtgcaacactgtgatctcagcttacttcaacctccacctcccgggttcacgccattctcctgcctcagcctcccaagtagctgggattacaggcacccgccaccaggcccagctaattttttgtatttttagtagagacggggtttcactatgttggccaggctggtctcaaactcctgaccttgcgatccgccctcctcggcctcccaaagtgctgggattacaggagtgagccaccgcgccccgcctaagctggtcttaaactcctgacctcagatgatctgcccgcctcggccttccaaagtgctgggattacagccctgagccactgtacccagcctacatacgtaatttaaatgtcctgaaaccatgtaaaagaaaatatatgaaatcaattttaataatgtattttattaaaccaagtttatctaaaatataatttcaacatgttaacaacactaaacatttgctttcttttgttctgtctttttttttttttttttgagacagagtctcactttgttgcccaggctggagtgccgtggtgcaatcttggctcactgcaaactccgcctcctgggttcaagtgattctcctgcctcagcctcgcaagcagctgggattacaggcgcccgccaccacgcccagctgatttttgttttgttttgttttgttttgttttttgaggcggagtcttgctctattgcccaggctggagtgcagtggcgcgatctcagctcactgcaagctccacctcccgggttcacgccattctcctgcctcagcctccggagtagctgggactacaggtgcccgcccccacgccaggctaatttttttgtatttttaataaagacggggtttcaccgtgttaaccaggatggtctgcatctcctgacctcatgatccgcccgcctcggcctcccgaagtgctgggattacaggcgtgagccactgtgcccggccctaatttttgtatttttagtagagacggggtttcaccatgttggccaggctggtcttgaactccagacctcaggtgatccgcctgtctcagtcttcgaaagtgctgggattacaggtgtgagacaccttgcccggcctcgttttctgtttttttgtttgtttgtttgttttcctgagacggtcacactgtcactccggctggagcacagtgatacaatcatatctcactgtagcctgaacctcttgggctcgagagatcctcctgtcacagcctccagagtagctgggactactggcttgtgccaccacgcccagctgattttcttattttttaatagagatgggttttcgccatgttgcccatgctggtctcaaactcctgggctcaagtgatcttcccacctcaccatcccaaagtgctgggattccaggcgtgaaccaccgcgcctggccaaaacattcttttttttttttttttggagtctcactctgtcccccaggctggagtgcagtggcgcaatcttggctcactgcaacctctgcctcctgggttcccaccattctcctgccctagcctccctagtagctgggactataggcgcctgccaccatgcccggctaattttttgtatttttagtagagaaggggtttcactgtgttagccaggatggaaaacattcttaatgaaatattttaggccgggcgtggtggctcacgcctggaatcccagcactttgggaggccaaggcaggcagatcataaggtcaggagtttgagaccagcctgccaatatggtgaaaccccgtctctactaaaaatgcaaaagttagtcaggcgtggcggtgggtgcctgtagccccagctacttgggaggctgaggcagaataatcacgtgaacctgggaggcagaggttgcagtgagctgagatcactccatctcaaaaaaaaaaaaagaaatatttttccttgttcccttcctgctatgtctccaaaatccactctgtattttacctttccagcacaacctaatttcagccagtcccatttcaagggctcagagaccacttgtggccattggtgaccatactggacagtgcaggtctgcaggggagtttaactaattgagggggtggcagggagagtgggtgaagactggccagagggtgcagctgtgagactcgaagtttctccaagaaaaagctagggcttccatatggatgagtggataatcactgttttttttttttttctgctgtgcctatcatttaactgaatggaggcaaagcatgtgttggttggtacattcaacaagttctaggttaagcgcctaccttccaggtgctgccggtacagtaaagcacagatgggacaaactcctgcctcctgaggctcacagtggagagggagagattgaaattaagcaactaccaaaggtggatcacttgaggtcaggagttcaagaccagcctggccaacatggcaaaactccgtctctaccaaaaatacaaaaattagccgggcgtggtggtgggcgcctataatttcagctattcgggaggctgaggcaggagaatcacttgaccccgggaggcgcaggttgcagtgagccgagatcgcaccactgcaccccagcctggacgacaagagtgaaactccgtaaaaaaaaaaaaaaaaaaaaaaaaaaaaaccgccgaaacagataaataaatggtaatggtgagaagtatgaggaaggaaaaatgcagggtcctctgaggacattggcaaggagccgggacgggaacgggtgatggaagccatggccagcttccaggccagagacggtggcctacacaagctgagtcagaaaaaatgctcagaggtgctggggtttgattaagtgttagggtgaacctcatggaattgccattttaacaggccaaaaatggtaaaaaaaaattagcaatttcatatgacccaagatagtatctagggcatggaaaggaggggcggggtactatactagttttgaggctcaagggatgacctatgaaccccctaaccgagctttgtttctggagagggggtccgcggcccgcatgagctccctcagtgagcctgcgacccctccgcccccacaagaaccaaaacttgacccggtgcccagagaggttgagtgagtttctcgggtcgcacagctgggagggacgaggggctgagccactgccaagggatcccgctgctctgtctcgctcaccggccgggctatgttgattgtcccctcgcggcgcccggaagcgaccctcagtaaacaaagccgtgtgtgggcgcagccccagaagcctggggcgcgcagtccagcccaagagaggcgggggaggaatgttgtgaatgaaccccgggcccgccccgaaactccgcataaggcctgggccgcgggggtcctcccactctgattggcctctggcgccccgtgattgacagcgcccctcgctgtgcgctctggttgggtaaacaagaaaagactggcatcgcagtcatcgagtgagcagcgaggcttggacacgggtctggcggcgcagccaatggcgggggagggccgaggaggccgagggggggccaatagggacaggcggtgggggcgggacgacggcggagctaaagcggcggctgaagcagcttcattgttgtgaagagtcttaaaggggccgcatcaccctgccggcccggcgcgggtcgggggtgggtgcggtaggggtcccggggcggccgagcgcagaggacggacgggaaggagggcagggggcgcgggagccggcgaagcggagcgggcatcggaccgagccccccaaagaggccccgccccggccctggccccggccgggccggatggaaccccccgcggccaagcggagccggggctgccccgcgggacccgaggagcgcgatgccggggccggggccgcgcgtggccggggccggcccgaggcgctgctggacctcagcgccaagcgggtagccgagagctgggccttcgagcaggtgaccgcgggggaagggggcgggggcagggacgcacccccagcaccttccccacctgtcttctcctcccccacaatccccagactccagagctaacccaatcagagacaccccctgagattccacccccaggacccttaaccctgcctggaaacaccccctcatcctcctgtttctgtccttcaaacccagtaacccacccccatcccttctctgccatctctgcccctcagcgccccagatcccaaatcaggacacttccttcttctcctaccaaccccagatctctgagatctggcccccatggcccgcctacaaccctgggcacccctcttttcccgccttatcccccaacggtacccctcttttcccaccttatcccccaacggtacccctcttttcccaccttatcccccaacggtacccctcttttcctaccgcatctttattcgccaatcagggcaccccattcagtcttcaatcctctcttcggccccccgcttggggacaccctgtctccctccatcgtagcctctagagactcacactaccccattcctgctctccagatccctaccgtacaccccaagtaaataactcccccatctctccagattccagctcaagacaccccttttttccccattcattcctgccctcgagcctccagattccacctgttccttggggacccctctctactcctccagattcctctttcggggctgcccgtcttctcctggcttgccgcagggattactgaaatgccagggtccctcctcctccccacctcatccccctgacctatcctatctcttcccataggaaaacagcaggggcggagcctgggtggtggtccctggacaggtgcacctagaagctctcttctgtggcttctggtggcactgacaggatgtcccagagctggggccctttaagtcccctttttcagcttcagtgtgggcccccaaggaactggagacatggcccagacttgaacaggaagcacacacgggctctatcctctgtccagcttcagggggcgttctttcctgcccggcctctctggagttaggaagtcggcctggacggatgggtttgggccaagtgtggatgggcaggctctgattcatggactggaaaatccctccttagtcatttgccaactgtccctgaggcctgggctggtcattgcctctcccacttcccctagaaacccaggtggagtaggggctaaggagggccccttcattgcatgtgagacacacagaacaatctgaaaaccatctccgagcctcccacaaacctgccctggccaagccgagccctcagagttcttgacccacagaagctcatggaatcccctgcaaccctttggcagttgttcttgttcccactttgaggaaactggggcacagagaagttgagaaacttgcccaaggtcacccagccagggaatagcaagtccagattggaaggcaggctcagccagctcactgtattgcccagagcccacagcggtggccaggacaccccctcccctcctggggccccttcccagggatggggcatggaagggaaactgaggaacgacagagtctgtcttaggagttgaaacaactcacagctctgggaccctgaacaagtgaattcatcccactaagtctcagattctcccagctataaaacaggttcatgatttagtatcaatgtgccatcaagggtgttcaatcttttagcttccctaggccacactggaagaagaactgtcttgggccacatataaaatgcactaacactaacaatagctgatgagcttaaaaagaaaagaaaagaaaatctttgtatttatttatttatttatttatctgaaacgagtctcagtctgttgccaaggctggagtgcagtggcacgatctcggctcactgtagcctccacctcctgggttcaagcaattctcccgcctcagcctcctgagtagctgggactacaggtgtgagccgccatacccagctaatttttgtatatttagtagagatggggtttcaccatgttggccaggctggtttcaaactcctgacctcaagtgatcctcccaccttggcctccctcccaaagtgttggaattacaggcatgagccaccgcacccggacgtatcttataatgttttaagaaagcttacgaatttgtgttggcctgcattcaaagctctcctgggccagggccgtggggcgtgggttggacaagctcacactaggtggctgtgagaatttggaaattacatacataaagtgttcagcatagtgtgtgcattcttttcttttcttttcttttttcttttcttttgaggcagagccttgctcagtagcccagtgaaacaatgattgcgcaatgacacaatcataactcactgcagcctcaaactcctgggctcaagcaatcctcctgcctcagcctcttgagtagctgggattccagacgcccaccaccacacctggctaatttttaattctgtgtgtgtgtgtgtagacatggggtctcactatgttgctcacgctggtctggaacgcctgagctcaggcaatgctgccgcctcagcctcccaaagtgctgagattacaggtgtccagccaagatgggcaccttaatcattattatcacttttttctaacttcttcctgctccaccaaagcctggtgggtgggaagatctcacaacagaatcccaagaccctgcagctaggaggatccaggagggaaaccgcaagaaagttctagaatgctaactatgggccaggtgttattgtaagttctttaagctctttacatccatactgcatatttagtctccacaatcctcaagaggttggtgccgtggacctccccactttacacctgagaatactgaggccaagtgacttgcctggggtcacagtgctcctaaatagtaaagctaggattcaagcctcggtttctctgtttttttatttttatttatttatttgagacggagtctcgctccgtggcccagactggagtgcaatggcgcaatctcggctcactgcaacctccgcctcccgggttcaagtggttctcgcgcctcagcctcccaagtagctgagattataggtgcatgccaccacacctggctaatttttgtatttttagtagagacggggtttcgccatgttggccaggctgctctcgaactcctggactcaagtgcaccaactgccttggcctcccaaaatgctagaattgcaggcatgagccactgccctgacctattttttttgagatgggatcttgctctgttgcccaggctggagtgccgctggtgcaatcatggctcactgcagcctcaaactcatggcctcaagtgaccctcctgccccaccctcccaggtagctgggattccagatgcatgccaccatgcctggctaattttttttatttttttatttttttatcttttttttttttttttcgagatgcagtcttgctctgtcacccaggctggagtgcagtggcatgatctcagctcactgcagcctctgccttccaggttccagcgattttcctgcctcagcctcccgagcagctgggactacaggtgctcaccaccacacccggctaattttttttatctttagtagagatggggtttcatcatgttggccaggctggtcttgaactcctgacctcaggtgatctgcctgcctcggcctcccaaaaatcctgggattacaggcgtgagccatcgtgcccggccagtttttttgtaaagatgggagcctctctatgttgcccaggctggtctcgaactcttggcctcaagcgatcctccctcctaagcttcccaaagcgctgggattacatcaaccccaggctcctaacccactggcccttcctacaggtggaggagcggttctcccgggtgcctgagcccgtccagaagcgcatcgtgttttggtcgtttccacgcagtgaacgggaaatatgtatgtactcgtcgctgggttacccgcccccagagggcgagcacgatgcccgggtgccctttacccgcgggctgcacctgctccagagcggggccgtggaccgcgtgttgcaagtgggtgagtctttgtcccccactcctgctggggaggccaggaggtccataccaggcctggaaatgggggagttggagggaggcctggggccaggggatgggaggttacagacctcaggcttcgaggcccagataggattgtacaagattttttttttttttttttttgagacggagtctcgctctttggcccaggccggagtgcagtggcgcgatctcggctcactgcaagctccgcctcctgggttcacgccattctgcctcagcctcccgagtagctgggattacaggcgcccgccaccgcgcccagctaattttttgtatttctttttttttttttttttttttttttttttttttttttttgagacggagtctcgctttttcgcccaggccggagtgcagtggcgcgatctcggctcactgcaagctccgcctcccgggttcacgccattctcctgcctcagcctcccaagtagccgggactacaggcgcccgccaccaagcccggctaattttttgtatttttagtagagacggggtttcaccatgttagccaggatggtctcgatctcctgacctcgtgatccacccgcctcggcctcccaaagtgctgggattacaggcgtgagccaccgctcccggccccattttttgtattttgtatttttagtagagatggggttttactgtgttagccgggatggtctcgatctcctgacctcgtgatccccccacctcggcctcccaaagtgctgggattacaggcatgagccaccacacccagcctgtacacgatgttttgagcaaaagctcaaggatcaccctagaacccaggcagcagggtttagacaaggggttgggggagaggatggtgaaccagaaacaggggaggagagatcccagaacttacacatcagagcccatgtaaaggaggggtgaggccagatgtggtggttcacacctgtgatctcaacactttgggaggccaaggcaggaagatcacttgaggccaagagttcaagaccagcctgggcaacacaatgagaccttgtcttcacaaaaaaatcaaaaaatgagctgggcatggtggcgggtgcctgtggtcccaggtacatgggaggccaaggcaggaggatcgcttttgcccgagaggtcgagcctgcagtaagctatgattgcaccaccgtactccagcctgggttacagagcgagatgctatctcaaagagaaaaaagaaaaaaaaaaaggaagagaggtgagggccactctagggacaagggtagaggttgagacatggtggtgaaggtgccagacctcaggcttcaggtccagatggggttgggttcgggattatgagctgaaggtggaaagtgctcctagagccctagacctcaggctgctgagctggggaatggggaatgaagtagtgagacggagagaagagcaggtcccagctgaggatcagagaagcagctgtcagccagcagtgagaggaggctccagacctcgggctgagggacccagtgatgctttgggccaggggtttagagccagaggtaagaatgatcctagacctcaggcagtggggcccacgtgggagttggacacaaagatttagagccacaggtgagagtcttagacctcaggcagagaggctgggatttcaaaggcttagagctattgttgagcaatggtcttagacctaaggcaacagggctgaggtgggaatgtagagtagaagtttagaattcttttttttttttttttccgagatggagtcttgctctgttgcccaggctggagtgcagtggcacgatctcagctcactgcaacctccacctcccaggttcaaggaatacccctgcctcggcctccctagtagctgggactacaggcacccgctatcatgcctggctaatttttgtatttttgtagagacagggtttcaccatgttggccaggctggtcttgaactcctgacctcgtgatccacccgcctcagcctcccaaagtgctgggattacaggtgtgagccaccatgcccagcttagaattttttttttttttttttttgagatggagtctcactctgttgcccaggctggagtgcagtggcacaatctcggcttactgcaacctccacttcctgggttcacaccattctcctgcctcagcctcccaagtagctgggactacaggcacctgccaccacacccagctaattttttctattttttagtagagacggcgtttcaccgtgttagccaggatagtctcgatctcctgacctagtgatccgcccgcctcagcctcctacagtgctgggattacaggcatgagccaccacgcctggccaaatttttttttttaagagatagagtctcggccgggcacagtggctcacacctgtaatcccagcactttgggggctgaggcgggtggatcacctaaggtcaggagttcagcctggccaacatggtgaaaccccgtctctactaaagatacaaaaattagccaggtgtggtggcacatgcctgtaatcccagctacttgagaggctgaggcaggagaatcagttgaacccgggaggcagaggttgcagtgagccaagatcatgtcattgctctccagcctgggcaagagagagagactctgtctcaaaagaaaaaaaaaagggagatagggtctcactctgttgcccaggctggagtgcagtggcgcgataatagctcactgcagccacaaacatctgagctcaagtgatcctcccacctcagcctcccaagtagttggtaccacaggcgcaggccaccacacttgactagtttttaagttttttgtagagacctggtctcactctgttgcccaggctggtctcgaactcctgggctcaagagatcctcctgccacagcctcccaaagcactgggattacaggcgtgacccaccatgcctggccaagtatcaggttaagatcagctgtgaagggtgggctcagacctcaagctaagaaaacaaaagggctgcagagactgggagagatgtaatgagaatagtggaaaggccttggatctcaggcagccagactcagaaagggaccagtagaggctgagccagaaaacaaaagtgaggcctgggactccagacctctggctgcagcaggccatttctcccagctagaggtcggggctgggctgatatgatgccccgtcggctctatctgctttggagcccctttgctgggacatggccccgctgaccacgggctccttgccacctccagctggtatgaggaagccatctccctgcatgacccaggctgggcctgagctgccgaaccagtcagatgagcctggcacctgggctgcccagggaggggcagggggagtgaaggggacacctggcccctggcttacttcatcagcccctcgccccaagcgccacgggtctttggcattttctcaggaaattgaggggctcctgaagccctggccatattcattgtaacccaaggaatcagaaaaccaccttcaatgtcatggtatgatactattcataattaaaataagagcaagtgttgggctgggctcggtggctcgcgcctataatcccagcactttgggaggccgaggcgggtggatcactaggtcaggagttcaagactacactaggtcaggagttcaagactagcctggccaatatggtgaaacctgatctctactaaaaatacaaaagattagccgggcatggtggtgcacgcctgtaatcccagctacacaggaagctgaggtaggagaatcgcttgaacccaggaggcggaggttgcagtgagtcaagatagcgccactgcactccagcctgggtgacagagcaagactctgtctcagaaaaaaaaaaaaaaaaaagcaagtgtttacttaggacttaacttcataccaacagcgttctaagcctttttttgagacagagtctcattctgttacccaggctggagtgcaatggtgcgatctcagctcactgcaacctctgcctcccgggttcaagccattctcctgcctcagcctcctgagtagctgggattacaggcgcccgccaccatgcccggctaatttttttatatttttagtagagacagggtttcaccatgttggccatgctggtcttgaactccggacctcaggtgatctaccagcctcggcctcccaaagtgctgggattacaggcatgagccactgcgccgggctgtctcttctaaaaatacaaaaattaggctgggcaccgtggcccacgcctgtaatccctgcactttgggaggctgaggcaggcggatcacctgaggccaggagttcaaaatcagcctgaccaacatggagaaaccccatctctactaaaaatacaaaattagccgggcatggtggcgcatgcctgtaatcccagctactcgggaagctgaggcaggagaatcacttgaacctgggaggtggaggttgcggtgagccgagatcacaccattgcactcctgcctgggcaacagagcaaagctctgtcccaaataaataaataaataaataaataaaattagccgggcatggtggtgtgtgcctgtaatcccagttacttgggaggctgaagcaggagaatcgcttgaacctgggaggcggaggttgcagtgagcccaggtcgcagcactacactccagcctgggccacagagcgagattttgtttcaaaaaaaaaaaaaatgcaaagtgagtgaggtgacttgtgctagtgaagtgactcggctgggctttgcaaccgggtcttgctgtgtaccacaaacaccgcctgtctctgggatgacacggatgcgacagtttggctttgatcctaggattccacctgagcggaaacatccgcgagccagggagtcctggagagcccgagcgcctctaccatgtctccatcagctttgatcgctgcaagatcacgtccgtgagctgcggctgtgacaaccgcgacctcttctactgtgcccacgtggtggccctgtccctgtaccgcattcggcacgcccaccaggtggagctgcggctgcccatctccgagacgctctcccagatgaaccgggaccagctgcagaagttcgtgcagtacctcatcagcgcccatcacactgaggtgctgcccactgctcagcgcttggctgatgagatcctcctgctgggctccgagatcaacttggtgaatggtaagggcaccccgggggtccggtggggagaggatgcccaagcgcacagccacgccacttgctgtgtgcccagtgctggtcacttactgacagaaagttgtgggggcggggggcggaaaacgcgccatggcctgcatcatctgaggtcacccacctggtgagtggcagatcccagatatctggacacaggacagatgagtagttgcaaatcagcctacgggcagagggcgagggcaggaggggagatcctgcgttagagggcaagtgggaggtctggccccagggctgggtatgtcaatagatggagcatcctgggtatgggaggagaagagggggcgtgaagggaatgtgggacgtttgtgggtgtcagaggtgttatgggtgaggggatacaccaggaggcgtggtgagggctgggagggtttggggggctccgaggggcttgggttgcctagctaggatggggaaggtgagtagtaggtggaggcatggatggatgatggagggaggtgctgggtgggtacagaaagtgttcgtgattggctgggcgcaggggctcacacctgtaatcccagcactttgggaggccgaggtgggcggatcagttgaggtcaggagttcaagaccagcctggacaacatggcaaaaccccatctctaccaaaatataaaaattagccgggcgtggtggtgggtgcctgtagtcccagccactcaggaagctgaggtgggagaatgggttgaacccgggaggcagaggttgcagtgagctgacatcgcgccattgcactccagcctgggagacaaagtgagaccctgactccaaaaaaaaaaaaagcgttcatgatcagtcactgagggcaactgatggtgtggaaaaacgaatgggtgggtgggggatatttttttttttgagatggagtcttcctctgtcacccaagctggagtgcagtggtgcaatctcagctcactgcaacctctgcctcctgggttcaagcaattctcctgtctcagcctcctgagtagctgggattacagatgcacaccatcatgcccggctaatttttgtatttttgtagagacaggggtttccccatgttggccaggctggtcttgaacttctgacctcaggtgatccacctgcctcagcctcccaaagtcctgggattacaggtgtgagccaccacacccagcctggacgggatattaacaatgccgttaggtgaatgggaattggaagctgagtgtggtggctcatacctataatcccagcatttgggaggctgaggaaggaggatcactcgagaccagcagttcaagaccggcctgggcaaaatagggagacctcctctctacaaaaaataaacaaaagtagttgggcatgatggcacacacacgcctgtagatacttgggaagctgagatgggaggatcatgagcgtgggaggtaaaggctgcagtcagctatgatcgtgctactacactccaacctgatgacagactgagaccctgactcaaaaaacaaaaaaaaaaaaagaagggaaggacagaactggtggtgattggaggtgaggatgagtggttgggtggggagggctttgactagtggagttaaggtagactgacagtggtggacagatgaagttagtgaaagaatgaaagatccaatgggtacatgcattgggagtgagttgatgggtgaatggaaggaaggttcacatatgtggatcaacatcgtgggtgggcagagtgggtgggcgctttgtgtagggtggatggatggacgaatggggtagtgggtgttttgagaggtacatatgaatggatggtttgataatgaatgggtggtttaatggaagcatagagagttaggattagttattgggtgataactaatagttatcacctagataactagggttagttattggatgatagttactgggtggggtggatagtgtacttgtgtgggtcaatggacaaatgggcgggtgggtattttgagtggttagttcacgtggattggaaagataaaaggggtgagtgggcagatagatcaataagatgagtatatagatgggtggatgggtgggaattatgggtagggtggatgatggacccatgatggggtaggtggttgtttaaagggtatggacatgtggatgaagtgaaatgggggatatggccaggtagatagaggctggcatgacttgggtgggggtggataagtgggttgtgtttcaggtgagacagatgagtaaacagatgggtcggtggtgttttgagtgggatgggtaaatggatgagtggatgggtagatggatagatgtgtagtgtttcaggagagatagatgaatggattggatgggtaagtaaatggatgaatgaacaaatggatgaatgagctcctggtgttttgggcaagatggatggatggatggatggatggatggatggatggatggatggatgaatattactacaggggagatagatggattggatggatgactcagtggataaatgagcaaatggatgagctggtggcgttttggacaagatggatggatgcatggatggatggacagatggatgcatggatggatgcatggatggatggatggatggatggatggatggatggatgggtgtatgggtgtatgggtgtgttgtgtttcaggtaagatagatgaatggattggatgggtgatgtattactctgttctcacactgctataaagacatacctgaaacaggttaatttaaaggaaacaggtttaatcggctcatagttctgcaagctacacaggcttctgcatttggggaggcctcaggaaacttacaatcatggcggaaggtgaaggagaagcaaacacatcttcacatggctgtcaggagagagagagcgaagggggagacactacacactttcaaacaaccagatctcatgagaactctatcatgagacaacactaagggaatggtgctacaccattagaaaccatccccatgatccagtcacctccctccatgccccacttccaactctggggatcataattcaacatgagatttgggtggagacacagagccaaaccatatcagatgactaagtggatgaatgagaaaatggatgcatgagctagtcatgtttaggacaagatagatggattgatggagggatggatggatggataaacatgaatagatggtcgggtgggatggacaagcagatgggtgggtggggtttaggtgggatggatggaactttagactgggttgggtgacttggaagaatggatggatgggtcgggcacagtagcttatgcctgtaatcccagcactttgggaggccaaggcgggtggatcacctgaggtcaggagtttgagaccagcctgaccaacatggtgaaatcccgcctgtactaaaaatacaaaaaaaattggcaaagtgtagtggggcgtgcctgtaatcccagctacttgggaggctaaggcaggagaatcacttgaacccgggaggcagaggttgtagtgagcgaagatcgtgctacagcactccagcctgggcaagaagagccaaactccgtctccaaaaaaaaaaaaaaaaaaaaaggacagctctcctcaacccaacccaaccccaactccagccccagcctcagcttcctttccctccctcccggcaggtgccccagaccccaccgccggcgcaggaatcgaggacgccaactgctggcacctggacgaggagcagatccaggagcaggtgaagcagctactgtccaatggcggctactacggggccagccagcagctgcgctccatgttcagcaaggtgccgtgcgggccggcggggcgcggggtgcagaaggccccggcggacgccccagcccttcctcaccaccctgtccccggcacaggtgcgggagatgctgcgaatgcgggactccaacggggcgcgcatgctgattctcatgaccgagcagttcctgcaggacacgcgcctggccctgtggcggcagcagggcgcgggcatgacggacaagtgccggcagctctgggatgagctgggtgaggcccaaaccccggtgcgtggtggacaccgggacttcggctcccatgggggctggcccactccaagattagggtctgttccctgaatccgccctccattcgtttggcaaacatttatgagcgcctctaaagtgccaggcatggtactgggcactggtggtccggcagagaacaagagagtcaaaatcctgttcacgtggatctgacaggaggcacaggcaatcaaatgtcattggcccaggggttgatacacacgtacacacgttttctttgttttgagacagggtatcactctgttgcccaggctggcgtgcagtggcacaatctcggctgactgcaacctctgcctcccggactcaagtgatcctacacctcagcctcccaagtagctgggtctacaggtgcacactaccacatccagctaatttttaattttttgaagagacagagtctcactatcttgccaagtctggtcttgaactcctggactcaagcagtcctctcacccagcctcccaaagtactgagatgacatgcatgagccaccacacccagcctacatgttttgtttctttttttctttttttagagacaggatctcactgtgcgcccaggctgaagtacagtggcacagtcacggctcactgtaacttcaaactcttgggctcaagtgatcctctggccttggcctctcaaagtgctgggatgacaggcatgagccactgtaccaagctgacatatttttgtttgtttgttttcttttcttttctttttttttttttgagaaggagtctcgctctgtcatccaggctggagtgctggagtgcagtggtactatcttggctcactgcaagctccgccctccgggttcacaccattctcctgcctcagcctccctagtagctgggactacaggcacccgccactaagtccggctaattttttgtattttttttattagagacggggtttcactgtgttaggcagggttgtcttgatctcctgaccttgtgatctacccgcctcagcctcccagagtgctgggattacaggtgtgagccacggcacctggcctgttttctttttttgacacggactctcaccctgtctcccaggctggagtgcagtggcacgatctcggctcactgcaacctccacctcctgggttcaaatgattctcctgccttagccttctcagtagctgggattataggtgcgtgccaccatgcctagctaattattgtatttttagtagagacggagtttcaccatgttgatcaggctggtctcgaactcctgtcttcgtgatccacccgcctcagcctcccaaagtgctgggattacaggcgtgagccaccacacccagccaacatatgttttcttttttcttttttcttttttttttgagacggagtcttgctctgtcacccaagctggagtgcagtggcacaatctcagctcactgcaagctctgcctcctgggttcatgccattctcctgcctcagcctcccgagtagctgggactacagaggcccaccaccacgcccggctaatttttttgtatttttagtagcaacggggtttcactgggttaaccaggatggtctcgatcccctgacctcatgatccgcccgcctcggcttcccaaagggttgggattacaggcgtgagccaccacgcccagccttttttttttttttttttttttgagatggagtcttgctttgtcacccaggctgtagtgcagtggcacgatctcggctcactgcaagctccgccccccaggttcacgctgttctcctgcctcagcctcccgagtagctgggatcacaggcgcctgccaccacgcccggctaattttttgtatttttagtagagatggggtttcaccgtgttagccaggatggtctcgatctcctgacctcgtgatccgcctgcctaggcctcccaaagtgctgggattacaggcatgagccaccgcaccggccaacatgtgttttctgtaagagacacagagttaatgttattcagccctgcaggccatctggtctctgtcatgaagacctcactctgtctattatagtaaaaaaggcagacacagacatatataccaaacgggcatggtagcatttcaataaaactttatttaagagctgggaggccaggtgcagtggctcacacctgtaatcccagcactttgcggggctgaggtagggggatcacttgggccccggaggttgaggctgcagtgagccatgatcacaccactgcactccagcccgggcaacagagcaagaccctgtctcaacaacaacaaaaaaaggcgcttggcacagtggcaggagcctgtactccctactacttggaaggctgagtgaggcaggaggattgcttgagcccaggagttcgagtgcagcttagacgacatgatgagaccctgtctctaaattttttaaaaaccggctttatttatagatacttactaatttatttgaattttatattattcccacaagttgcaaaatattcttttggttgtatttccctgaccatttaaaactggaaaaataggccgggtgcagtggctcacaccttaattccagcagtttgggaggccgaggtgggcagatcacttgaggtcaggagatcgagaccagcttggccaacatggtgaaaccccgcctttactaaaaatgcaaaaattagccaggcattgtggcggacgcctgtaatcccagctacttgggaggctgaggcaggagaatcgcttgaacccaggaggtggaggttacagtgagctgagattgcgccactgcactccagcctgggtgacagagtgagactctgtctcaaaaaataaataaataaaaacaagtacaaataaaaagggaaaaataaatcttagcgtgcaggctaatcaaaaataaagggtggttcagttttcaccatgggcagtggtttgctagttcgcagacccctgcatgagatggtgataaatgctacccaaaaaaccccaaaacaccttgagaggagtctggaggcctggtttttttgtttgtttgtttttgtttttgttttgttttgttttgagatcgagtctcactctgttgcccaggctggagtacagtggtgtgatctcggctcactgcaacctctgcctcctgggttgaagcgattcttgtgcctcagcctcccaagtagctaggactacagaggcccgggatgtaatcccaacttttttttttttttttttgagatggagttttgctctttttacccaggctggagtgcagtggtgtgatctcagctccctgcaacctccacctcccgggttcgagccattctcctgcctcagcctcctgaatagctgggattacaggcacccacaatcatgcctggctttttttttttttttttggtattttcagtagagacagggcttcaccctgttggccaggctgttcttaaactcctgacctcaggtgatccgcctgcctcagccttccagagtgctgggattacaggcgtgagtcatcacgcctgaccctctaatcccaacttctaacttaccagcggtgtgaccctgtgcaagccgtgttatgtctctgtgcctcagtttgcttgtctgtaaggtgcaaaggctgcgagttgcaacttccgagggtcgaggtgaggggttagcagatcatcaggtggcacacagtgggcactgcggaagtgtgtgttgctgccactgttggcaggaatattgagcctgccccgtgcctcctcaggggccctgtgggtttgcgtcgtcctgagcccccactgcaaaccagaggaaagggcaggctggctccagctactcagcaggtgggacaagctcgacgtctgcccactggaagagggcaactactccttcgacggccccagcctgcagcccaccatggcccccgccccaggtaggagagaggggtctttaccatgccccccaaaaaccatcaccactaactgtggccccacttaccatcatggtcctcttcccaggagagagagggagtggggcagagcaaagcagaccccagtccttggctgttcttccaggactaatcccaacttgtctagccaggaaagagcgagtgccaagggcaggagcaatggcagcccaagtgggcaagtgaagtaaaatgcttaaaacacctgcagtcctgggctggtctggcttggccttctgctagctatgggaccaaagagaggatgagagaggaaaaaaggaggaatcaaacagaaggggaaagtgagatattgaggagagagaaacaagtgaagagaggcagagatggatggagagagggagaggcagacagaggagcagataggaaggaagacagagagagattgaggagagagggaaaaaaaaatttatagcaagtacaggccaggcatggtgtctcacgcctgtaatcccagcactttgggaagctgaggggggcagattgcttgaggccaggagttcaagaccagccagagtaacatggtgagaccttgtctctacaaaaaatacaaaaattagctgggtgttgtgacgcacacctggaatcccggatactcagggggctgagatgggagaatcgcttgagcctgggaggcggaggttgcagtgagccaagatcgcaccactgcactctagcctggacgacagagtgagaccctgtctcaaaaaaaaaaaaaaagaaagaaagaaagaaaagaaaaatagcaagtaggaagaggaagacagacagccagttagttgctcaacctcagtttcctatcaatgtgatgggcctgtactagctcctaacacatacacgcatccttttttttttttttttgagacagtctcactctgatgcccaggctggagtgcagtgacgcaaccttggctcactgcaacctctgcctcctgggttcaagcgattctcattcctcagcctcccaagtagctgggattacaggtgtgcaccaccacgccagggttaattttagtagagatggggtgtcgccatgttggccaggctggtctcgaactcctggcctcatgtgatcctcccaccttggcctcccaaagtgctgggattacaagtgtaagccaccatgcccagcctacacatgcatctttgaagggtggcttcaaggactgggcagatgatgtatgcccatagctttgcccaggcctaaaccccagttagtacttggtgggaaaagctggacacggctcaactgctatagggaccccccctcactgagccatgttgggtgcctctctgcaggctcggaggaagaggaagaggtggcagccacaagtccccgccacacggtatttggccgcgccttgctggctggagagctacactggaatgacgcctacctgcagaggatcctggccagtgactcctacgggcccagcctcacaggcagcgtgggtggggacaaaccgactttcgacccccagggccgcccactgtggctgggagaacctttccccactgcctgtgcccgtgtggacaccctgcgtgcccacggatacccccgccaggccctgcggctggcaagtgccatcatcaacacactccggctgcagcagcggcatcagctagagagctacaagcagcagaaaaaaggtcagcctcagccgggcacgggggctcgcacctgtgatcccagcacattgggagtccgaggtgggaggattgcttgaggccaggagttcaacatcagcctgggcaacatagtgagacaatgtctctacaaaaattaaaaaaaaaaaattagctggatgtggtggctcacacctgtagtcccagctactctgtaggctgaggcaggaggatcacttgagcccaggagttcaaggctgcagtgagctataattatgccactgcactctagcctgggtgacagagcaagacctcatctctttttttttttgagacagagtttcgctcttgttgcccaggttggagtgcaatggagcaatctcggctcaccgcaacctccacctcccaggttcaagggattctcctgcctcagcctcccaagtagctgggattacaggcatgcgccaccatgcccggctaatttttttgtatttttagtagagatggggtttctccattggtgagactggtctcgaactcccaacctcaggtgatctgcctgccttggcctcccaaagtgctgggattacaggcttgagccaccgtgcctggaaattttttttttttttttttttttttttttttttgagatggagtctcggtctttcgcccagtctggagtgcagtggcgcaatctcagcttactgcaacctctgcctcccaggttcaagcaattctccggcctcagcctcctgagtagcttgggactacaggcacccaccaccacacccagttaatttttgtgtttttagtagagatggggtttcactatgttggccaggctcttctcgaactcctgaccttttgatccacccacctcagcctcccaaagtgctgggattacaggtgtaagccaccgtgcctggcctactgaaaatatttttaaaattagccaggcgtggtggcgcacacctgtatttccagctactagggaggctgcggcatgagaattgctttaatctgggaggcagaggttggttgcagtgagccaagattacaccactgcactctagactgggtgacagagcgagactccgtctcaaaaaattaaaaaaaaaaaaagagagagagaggagagcgaggagagagagaagaggaaagaaagaggtggggagggagggacagagagagatggggggagagagaggggaaggaaggaagggagggagggaaggaggctgtatgagccccaaaaaccacattgtgtactagatatgggggtgggggacaggagggaggccaccagttgagagagctagtcgatggggttgatggatcagctatcaggaaattgaacgaagaaaagtgtgtcgtggaggaaacatgggggccctgggacccgagcagagctctgaccaggcttggcagcatcagtgaaaggcccctagattttaaaaattagccaggtggctaattagctgagtatttaaggatgtgcatggccaggcacagtggctcacacctgtaatcccaacactttgggaggtggaggcaggtggagtgcctgaggtcaggagttcaaaaccagcctggccaacatagtgaaaccccatctctactaaaaatccaaaacaaattagccaggtgtggtggcacgtacctgtattcccagctactcaggacactgaggcaggagaatcccttgaaccgggaggtacctggaggttgtggtgagctgagatcacgccattgcactctagtctgggcaacaagagcaaaactccatctcagaaaaaatttaaaaaaagaaaaaggatgtgcaggagttacccaggagaaggggatggaggaagtgctcagaatagaaggaacaccatgagcagcagccaggagggaagagagtacgtggcttggaggacgaggctggaggattggcctccagatgaggcaggtcaccagtatatggaaaaacttcatactggtccttgggggccctaaaggctgttggggctttatcttcagagaggtggagagggaataagggcaatgaggaggggaatgacacttcgggtgttttagaaagcgtccagtggccaggcatggtggcccatgcctgtaatccctttgggaggccgaagcaggaggatcgcttgagctccagaggctgcagtgagctatgattgggccactgcactccagcctgggcaataagcgagaccccacctcaaaaaaaaaagttgaaggtgaccattgggtgagcaggtggtgggcattatggggctaggctggctggcaggtcaagaagaggaatatccctccctcctagagacttgggcaggtgtgtgggcattgagccccctctttccacctgcagagctgctccagaagggctccacctgcatcaccaacaccgaaggatgggtggggcaccccctggaccccattggctgcctctgcagggcgctcctggaggcctgtcgtctggaggaggagacacttaccctttacccaggtactcacatggggtactcttggaggaggtgggacaaccccgcctcgttggccacgccccctggcccagtacccctataaggtaactcccagactctgacccttggccacgcccctacccttggctacctcctctggccagtgcccagagccaataggcttagcttctcctgaaagtgaggccaccataggcctagctgctgctagaaggtggggctcccgcgctcccccaaccccgtgagtgctgggagcttctgggctccctctaaagcctaccctgcgcccaggtctccatgcttgaggccaagggctacagggaccttagggaaggggatccgtctccagcagccctggccctgtctcccccagactcaggccccgagaagcggaaggtggcctaccagcacgtgcctgtgcccgggagccctggggagtcctacttggtgctggcgctggaggtggcactgctggggctggggcagcagcgggccctgccggaggggctgtacgcccaggacaaggtggtgcgcaacgaggagcagctgctggccctgctggaggaggtggagttggatgagcggttggtgcaggtgctgcgcaagcaggcggggctgctgctggaaggtgaggccgcgcccctaggcctggctgttgctgaagggtagggtccagcccctggtcctgtagcggcccggttgctgccagatgggaggccccgccccagccccgcccctagccccgcctcctggtgatactgtcccctcataccttggcagtttctaaaaggagagagccagctctttttcccgccacctagtgcgtgctgccagccagcaactgctgcgtgtgctgaggcgccgcccccttccctcccgggagccagtgagccaagtggttgatgttaaagcgagggcgtcccaccttcatccgcaacttagacaccgcccctgtcccggcctgctcctcattggccccgccaatggccaggccctattgacctgtgtgttgtgagactccgtcccctagcgctacagggagccgtttatccctgccccttcaaggccccctacgctatcggacttgctggtcttggccgctggtcccgttccccaaggcaggtgcagccccacctccaccctctggccccaccttgtatctgagtcctgctcctcacctgcgagtgtgcctggagtctcttcttttccttttccttttttccttttttattttgcgacagtcttcactctgtcacccaggctggagtgcagtggcgcgatctcggctcactgcaatctctgcctcccgggttcaagtgattcttctgcctcagcctcccgagtagctgggattacaggcgtgcgccaccacacccggctgatttttgtatttttagtagagatggggtttccccatgttggccaggctggtctcaaactcctgacctcaagtgatctgcccgcctcggcctcccaaagtgctgggattacaggcatgagccgtggtcccctgcctcctctttttttttttttgagacggagtctcgctctgtctcccaggttggagtgcagtggcgcaatctcggctcactgcaccctccgatcccgggttcacgccattctcctgcctcagcctcccgagtagctgggactacttgcgcctgccaccacacctggctaattttttttgtatttttagtagagacggggtttcaccgtgttagccaggatggtctcgaactcctaacctcgtgatccgccagcctcggcctcccaaagtgctgggattacaggcgtgagccaccgcgccaggcctcctcttttatttggattacccagagattgcctcagtctcagacctgaacccctaccccagagacccatctagccacagccactctacccaggggccagcccaccctctacttaaagcctggggtctagtgagacctggggaagggcagaggcgagcccacacttggggactgagctcaggctgttcctgcagggggtcccttcagtggctttggggaggtgctgttccgggagagcgtgcccatgcacacctgtgcccgctacctgttcaccgcactgctgcctcatgacccggacctggcctatcgcctcgcgctgcgagctatgaggtgaggataggtggccaaggcagtggcagggggagctggggggaagaggggcgggcatggggggtagctcagagccccacccatccagcctgaactcacagcctagttaattcagtctctctcaccctggcatttgatgatgccatgtgcttttcattattattatttatttatttatttatttatttatttattttgagctggagtcctctgtgacccaggctggagtgcagtggcgcgatctcagctcactgcaacctccacctcctgggttcaagcaatttcctgcctcagcctcccgagtggctaggattacaggcatgcaccaccatgcccagctaatttttgttttttgttttttttttttttgagacggagtcttgctctgtcacccaggctggagtgcagtggcgcgatctcggcccactcccagggccgatctcagctccgccttccaggttcacaccattctcctgcctcagcctcctgagtagctgggaccacaggcgcccgccaccacgcccggctaattttttgtatttttagtagagacggggtttcaccgtgttagtaatttttgtatttttaatagagacaggatttcgccatgttgcccatgttgtctcgaactcctgacctcatgatccacccgccttggcctcccaaagtgctaggattacaggcataagccacctcgcacagccgtgctttttattattaagtataaatgtgtgttttttgttttgtgttttttttgttttgagacagggtctggctctgtcacccaggccagagtaaagtggtgccatctctgctcagtgcaacctctgcctcccaggctcaagcgatcctcccatctcagcctcctgagtatccaggactccaggcgtgcaccaccgcactgggctaatttttgtattttttgtagagacggggtttcaccatgttgctcaggctggtctcgaatttctgagctcaagtgatccgcccaccttggctttccaaagctctgggattacaggcgtgagccactgcacctggctaaatgtgtaatattattttgagtttgagaatattcacatgatacatgaaaagatacacaaagctgaaatcttttctaggcagttttatctcagcctatccagatctctccggatgcaagcagggttatcacttttgtgtctatcctgcaagaattgaggtttctgcaaacccataatctggaaattgaacgttgatcctccttttataccagtggtacatcctgtatctattctttgcacctttttctcactgagctttgcatcttacaggatttgtcttatcacacagtacgtgaatcactgcgtagccttccactctaaggacacgtcataaaagaaccacttggaagctgatagacatttacgcaatttccaaaaaaaaaaaaaaaaggcaatgaataacctggttttcatttatcacgtacaccagcagattcacagaaggagaatatttgaaagccaacttggccgggcatggtggctcatgcctgtaatcccagcactttgggaggccaaggcggacggatcacctgaggtcatgagtttgagaccagcctggccaacatagtgaaaacctatctctactaaaaatacaaaaattagctgggtgtggaggtgcatacctgtaatcccagctactccggaggctgagacaggagaatgacttaaacccgggaggtggaggttgcaatgagcccagatcgcaccactgcactccagcctgggagacagagcgagactctgtctccaaaaaaaaaaaaaaggccaactcaatagtaaaccatgcccaaaaaggtgcaacctattccacaccttctgaaaccatccttcagaggtacctataaacaacttgggatccagcctggtacacatctatggtcctagctacttgggaggctgaggagggaggattgcttgagcccaggaattcaaggctgtagtgatctatgatcccacctatgaattgccactgcacgccagcctgggcaacagagcaagaccccatctctctcttttttttgtccttttagagacagtctcgctccattgcccaggctggatatgcaatggcaggatcatagctcttcacagcctcatatacatgggctcaaaggatcctcccacctaagcctcccaccaagtaactgggactacaggtacttgtcaccatgcctggctagttttaaatttttttttttttgagagggagtctcactttctcgcccaggctggagtgcagtggcacaatctcagctcactgcaagctccgctcactgcaagctccaaacctcccgggttcaagtgattctcctgcctcagcctcccaagtagctgggactacagtcacccaccaccacgcctggttaattttttgtatttttagtagagacaggttttcaccatgtcagccgggatggtctcaatctcctgacctcgtgatccacccacctcagcctcccaaagtgctgggattacaggcatgagccaccacacccggcctagtttaaaaattttttttgtaatgatgggatctcattacattgcccaggttggtctcaaattcctggcctcaagcgaccctctcgccttggcccatctctttaaaacacacaaacacacacacacatacacacacacacacacacacacacacacacacacacacacacagtttggagtgtttttccagaatatttagaaagaacagcctgtaagagccaagatttagacaacagacttttctatgcaagaattttttttctcagcaaaatacagcccatggggcctaatttggccaaccacctgttttcgtacagcccatgagataagaatggtttttacatttataaacggttgaaaaaaatcaaaagaatattttgtaacacatgaaaaatatatgaaattcaaatttcagtgtccagaaatggttttattggcacacagccatgtccattcatctgtgaattgtctgtggcttttctggcagaacaatgacagaattaagtcattgaaatacagatcagtggccaggcatggtggctcatgtctgtaatcccagcactttgggaggccaagacgggcggatcacttgaggacaggagttcaagactagcctggccaacatgatgcaaccccatgtctactaaaaatacaaaaattagggccaggagccatggttcacgcctataatcccagtactttgggaggccgaggagggcggatcacctaaggtcaggagtttgagaccggcctgaccaacatggagaaaacccgtctctactaaaaatacaaaattagccaggtgtggtagtacacgcctgtaatcccagctactcgggaggctgaggcaagagaatcgtttgaacccaggaggcagaggttgcagtgagccgagattgcgccattgcacgccagcctgggcaaaaagagtgaaactccgtctcaaaaaaaaaaaaaagaaagaaaaaagccaggtatggtggcacgtgcctgtagtcccagctactcaggaggctgaagtgggaggattacttgagccgagaagtttgaggcttcagtgagctatgattgtcccacaggactccagcctgggtgacaacagagtgagaccctgtctctaaaataagtaaatgtatcaatttataaacaacactgcagtgaacatcttgcacacacatcttccatcatcttgggctctcagggctctgctggctgaagtggggaggctgggccaggaggcttctctgtctcctagagagaatggggacagcagcccctcctcaccatggctcacttctccccttacccaggctgcccatactggagacagcatttcctgctggagaacctcatcccagcccgctggactccatcatgagcaaccgcttcccccgctggttcatccttggccacctggagacccgccagtgtgaactggcttccaccatgttgacggccgccaagggtgaggctggcagctgtcccgattcctttgtcttcctcctctgtcatctccttcttccttccctcttaactttcctgcctcctcttatcctttcacaaacttccccctgcattctttgagcacctcctatatgtaccggacactgtctcaggtgctggggatgtagcaggtgacaaaactgtcccagatcccctgccctgtggaatgacattctagtggggagaagagagtgatgcagtaaatgagacggtaacaggtgccatggagtggaataaaacagttgaacatttaagcagagacctgaagatgaggtggagccttgcaggtacctggtgtcttagctcaggctgctgtaacaaaacaccagagactgcgtgacttcaacaacaaaaatttattttctcacatttctgtaggctagaagtctaagatcactatgtcagtatggctagctcctggtgagggctctcttctcagcttacagacggccaccttcttgctttgttgagagttggggggagtgaagtggggagtagagaggaaagtgagagagaggaggctgggagagagagagagggagaaaggagagatagtagggggggatagagagagagggagagagaggagtcaggtgccagagaggagagagagaagaaagagaagagggagagaggagagacagagaggagaagttaaatttctccagtgtatcttcttctaaggtcactaaccctctcatgagtacctgaacttcatgacctcatctaaacctaattattggctgggcacggtagctcatgcctgtaatcccagcactttgggaggctgaggcgggcaaatcacttgaggccaggagttcgggaccagcaaatcacttgaggccagaagttcttcaagaccagcctggccaatatggtgaaaccccatctctactaaaaatgcaaaaattagccaggcacagtggtgcacgcctgtaatcccagcgatttgggaggccgaggccgggggatcacctgaggtcaggagttcgagaccagcctggccaacatggtgaaactctgtgtctactaaaaatatgaaaattagctgggcgtggtgaccggcacctgtaatcccagctacttgggaggctgaggcaggagaatcacttgaacccgggaggcaaaggttgcagtgagccgagactgcaccgttgcactccagcctggacaacaagaacaaaactccatctcaaaataataataataataataataataataataataataataataaaagctaacatttgagcagctccttgccatgttaaggccttgccaagtatgggcccaccaccaccctgtgaggtgggttccattgcctgagtgttacccattttacagatggggcagccagggcacagagaggtgaagtgacttgctcagggtcacacagctagtgggtggcaggaccaggatttgaaccctggcattctgggtgtgcaaccaatgcccttgagatgagggagaggtccataggatccctaggtggcttttcttttcttttttttttttttgagatggatattactctatcatctaggctggagtgcagtggtgccatctcagctgactgcaacctctgcctcccgggttcaagcgattctcgtgcctcatcctcccaagtagctgggattacaggcacccgccaccatgcccagctaatttttgtagatggggtttcgccatgttggccaggctggtctcaaactcttgacctcgtgatccacccacctcagcctcccaaagtgctgggattacaggtgtgagccactgcgcccggcccctaggtggctttctgtaacaggaaagggccagagaggagataattggcaagggctaggggcactgaggtctgaatcttcacagaaccatggcccagtacacatccctccacactcacacatgtgcccctgggtggaaggatctgtgtgaacaggtcgggtggtggtcagaggctggtgctgaggtgtatccgatggtgtcctctgtcccgcccttcacccaggagaccccaagtggctgcacacggtactgggctccatccagcagaacatccactctccggccctgctctttaagctggcgcaggacgcctgcaagacagccaccccggtcagcgccccaccagacaccacgctgctgggcatcgcactggagctggggctgcaggtgagggctgccaggtggatgcgggagggcgatggtggctcggggccaggactgactgtgagctgcgcctcccggggcatgggctgagtgtgagccacttcgctgggggcccggcatttgcgtgagctattcctctgtggctggggactgagcgagaaccactcttggggcggggactgtgagtgagacacacctctgggggcgtggcctgagtgtgggccacttccttgggggcgtggcatgagtgagccactcccctgggaatggggactggatgaatcgtgtctctggggatggggtcttcacttgggccacacctctgcaggtggggcctgagtgtgaacctcacctttaggggcggggccacagaaggccaaggtctgtaagtcatgggagtgtgggaatggggttcccagtagggatgaagcctatgaattattaatagaatccgtctatggaggagactgaggtctaggggagagttgtcactggagcggagaggcagggcctgcaagccagcagatggatcgcaagcggagcctgggggtggggcctgggagtgatgtgctattggttaaggatcatgggtgggtgagtttgaagctgagggtgaggcagagcctagcaataaagagcttccttgggggcagggcctgaagaggattgccgcctaaggagagggattcaccactgaagggctggcctggcggaaggtcttgaagatgagatgccaactctaggggtggggtctgtggttgaaagccctgtatgagcccgggtgtggtggctcacatctgtaatcccacactttgggaggccgaggggggcagatcacgaggccaggagttcgagaccagcctggccaacatgatgaaactccgtctctactaaaaatacaaaaattagccaagcgtggtggcacgcgcctgtaatcccagctactcgggaggttgaggcaagagaatcgcttgaacccaggagggagaggttgcagtgagccgaaatcacaccactgcattccagcctgaaggacggagcaagactccgtcttggggaagaaaaaaaaaagtcctgtatgcagggcctgcaactgagtgtctgggtcatccccaggggctgaacaaagggtggtcctgcaaggccaaatcttgggtgcagcttgctggaaaggtgtcattggtagggtgtgagtgccatgggacctggaggagggtggggtctgcaggatagacaggtaaggggcggggcctcaaagggtggcagaagttcactaagaagataaggaatagggccgggcacagtgcctcacacctgtaattccagcattttgggaggccaaggtgggaggattgcttggggccaggagtttgagattggcctggacaacatagtgagacccccatctctacaaaaaactttaaaaattagccaggtgtgatggtgcacccctgtagtcccagctcctcaggaggctgaggcgagaggatcgcttgaggccaggagtttgaggctgcagcagtgagctatgatcgcgccactgtactccaggtaacagagcaagaagaccccaactctaaaagaaaaaaatagaaaagaaaaaagaagttggggccaggccctgtggttcacacctgtaatcccagcactttgggaggccgatgcggatcgcttgaggccaggagttcaagaccagcctggccaacacagcaaaaacccgtctctcccaaaaatcagccatgcatggtggtggacgcgtgtagtcccagctgctcgggaggctgaggcaggagaatcacatgaacccaggaggtgtaggttacagtgagccaagagaccacaactgcacttcagccccggcgacagagtgagaccctcaaaaaaaaaaaaaaaaaaagaaaagaaaaaaaaagaaactggggaccttcccagctagaacaaacaagggccagcagggtgcagaatcagccctggacagcctcctgattggagccgttgtagtgtggggagcaagacaaggagctttcagaggctactcaagaggtaggagcttacagaaggcagggtctgcaggacaggacctgtggatggggcctcaggggagaggcaaacacgtgagctgctgattggtggtgggacctagtgaaggtggggcttatacagcaggtacttagaggcaagagagaggagccaacaggaagcatggaggtttcaggagcgaagggacaggttggtttgttccggcataggatctatgaggtgggatctggggtaggatctgtgaggactcacttcagaagaacagcaacaacagcagtgatattaagagctgacattacctgagagcattttcaagcaataagcaccttgcagaaagcttcacctacgcaattttgtttacttctcacaacaatcaggctgggtgcagtggctcacgcctataatcccagcactttgagaggctgaggcgggcggatcacttgaggtcaggagttcgagaccagcctggccaacatagtgaaaccccatctctactaaaaatacaaaaattagctgagcatggtggcgggcacctgtaatcccagctacttgggagcctgaggcaggagaatgcttgaactcgggaggcggaggttgtagtgagccaagatcgcaccactgcatgccattctgggtgacagagcaagattccatctcaaaaaaaaacaaaacaaaacaacaacaaaaaagaaaaaacaacaatcctatgagacagatactattttatctccattttctaggtaattgaggcccagaaagttgagatcacttacccgggttcattggatcagctttaacctccaagtgtttctggggtcctccatctcccaacgcccctccataggccagcccaagactcaggctaacccccttctccccacccctaccttgcaggtgatgcggatgactctgaacgtaatgacctggcggcggagggagatggtgcgctggctggtcagctgtgccacagagattggtgagagcccctaaggggacctgccacccacttcgctgttctggttctgcagagcgcactgagagaaccaggcagacaagaaagagagaagtggcggggtgcggtggctcacacctgtaatcccagcactttgggaggccaaagcgggaggatcacttgagcccaggagttcaagagcagcctgggtaacatagtgagaccccatctctacaaaaaattaaaaattagctgggcgtggtggcaagtgcctgtagttccagctgcttgggaggctgaagcaggaggatagattgcttgagcccaggaggtcaacgctacagttagccatgatcataccactgcactccagcctgggcaacagaggaaaacctcctctgggaaaaaaaaaagagagagagagagagagaagcaagccaggcatggtggcacacacctgtagtcctatccggagggctgaggtgggaaaatcacttgagcccaggagattgaggttgcagtgagctgtgattgtgccactgcactccagcctgagtggcagggtgagaccctgtctctaaaaaattgtttaacaaaaagaaagagggccaggcgcagtggctcacacctgtaatcctagcactttgggaggccaaggcatgtggatcacttgaggtcaggagttcgagaccagcctggccaacatggcaaaaccccatctctactaaaaatacaaaaattagccagatgtggtggcaggtgcctgtaattccagctactcgggaggctgaggcaggagaattgctggaacctgggagacagaggttgcagtgagccgagaactcactaccgcactccagcctgggtgacagagcaagactccatctcaaaatgggcagatcacaaggtcaggagattgagaccatcctggctaatacggtgaaaccccgtctctactaaaaatacaaaaaaactagctgggcgtggtggtgggcccctgtagtcccagctactcaggaggctgaggcaggagaatggcgtgaacccaggaggcggagcttgcagtgagccgagatggtgccactgccctccagcctgggcaacagagcgagactccatctcaaaaaaaaaaaaggaaagagaagtagagactcttcagagactcttctccgattccagcctgtgctcagggcttggccgggagggaatggctggccagcatggagctggacaaaggcctagaggctggccaggctaatgtggctgcagggggttgagggggttgcagaaagaggctccaaagcttagccttctacacacgtgattcccacctagtccaggtgcgccctgatgatttggaaaggaagtttctgttcagcatggtgtggaggtggaagtggaggtggcagtgtcatggttaacccacgcatacatgtacgtgtgtctgcccccgctcctgacggatttccctccctcacctcccaccaggcccgcaagccctgatgaatatcatgcagaactggtattccttattcacaccagtggaggcggctaccatcgtggcagtgacgggcaccacacacgccactctgctgcgactgcagctggacacatcgcggagggaggagctctgggcctgcgcccgcaccctggccttgcagtgcgcgatgaaggaccctcagaactgcgccttgcctgccctgaccctgtgcgagaagaaccactcggccttcgaggcggcctaccagatcgtgctggacgcggcggccggcggcctgggccacgcccacctcttcactgtggcccgctatatggagcaccgcgggctgccgctccgggcctacaagctggcgacgctggccctggcgcagctcagcatcgccttcaaccaggacagccaccctgccgtcaacgacgtgctttgggcctgctctctcagccactccctgggccggcacgagctctctgccatcgtccccctcatcattcgcagcatccactgtgccccaatgctgtccgatattctgcgccgctggactctctcggcgcccggtctgggccccttaggggcacgccgggccgccaagccactgggtgccgaccgggcgccgctctgccagctcctggacgcggcagtcaccgcctacatcaccaccagccactcgcgcctcacgcacatcagcccgcggcactatggggatttcatcgaattcctgggcaaggcccgggagaccttcctgctggcgcccgacgggcacctccagttctcacagttcttggagaacctcaaacagacctacaagggcaagaagaaactcatgcttttggtgcgggagcgttttggttgagggacagtggggtgcgtgggagtggggatccccctcgcccctgcgtcccccacccttgctctccaattaggcccacgtggcatttcagtattattaagtcagggaaggagcccggctggagatgggggcagggggagcagcatcctgccacgtgtgtgcctgggagtctgtgagcaagtgtgcaagactccagaagcagaagccatactgccacccagaagcctggaaggggtgtgtgcttgggctgctggtatgaccccactttgggcaccccaaaagcaataggcaaactccccttacccagactggcttgggctccaggagggaggctgggaggcaggactttccagaaatcgaccctctaagtcaatgtagcacattttcccccaaccccaccctgggtggccaagggtcctcccccaccccctactgctcagggccccccattatgccacctccaaagtggctgcccagccaggaccattggctcacccccactgaaggaattgaagaggcctcaggcctcagcctcatacctcacccccttatcctatccggccaggacccccatttccttgggcactagggtcccagggtgggctcagggttggggaagtcctcgctgccctctcttctcacctgctagtcactggacgtacaactcaggaactgagcgaggctcacactgccccttccaacctggggttgggggacacagacgcgagagagccggagacccccacccccgatctggaaaggaaagagacctgtatcttggtgtttttctggctttttcaccctttcgcctcctgtctttctgcttcgccccttcatcttactctgtttccatttttcccggcacttacctgcctttctctctgcacctaagtccctgccgccctctctctttggccatccttcctttcccccaccttgacccagggaggagaagggagaacatcacccccccaagtcacccccacatcttttcccttcttgtatattaaggacaaaataccacatcattttgtaactttttttctatttattgaacggtgtattacatgtccttttcctttttttttttcaaagattgaacagaaatttttctttttaattttattttgagactggggtgcatctccagagccactcacaccctcaacctcgtttcctccgcaaaaaaaaaaaaaaaaaaaaaaaatgtctggccttatttctgggtgcagcgccaagcgaggggtgggatgggagcgactgctggcttcattccatggtaattatgtaaatatttccctttttttttttttggtctttctctgttgcccaggctggagtgcagtagcgcgatctgggctcactccaacctccacctcccgggttcaagcgattctcctggctcagcctcccaagtagctgggattacaggcatgcgccaccacaccgggctaatttttgtattttttagtagagacggggtttcaccatgttggccaggctggtctcgaacacctgacctcaggtggtctgcccgcctcagcctcccaaagtgctgggattacaggcgtgagccaccgcacccggccttatgtaaatatttcaaaacagagatggacagctcaccatgagggaacacagggctgaatgcgttaccgctgtcatttaatcgtcaccacagccctatgagttggtaggattatcttttccattttacagatgagaaaactgaggttgcaaagtggaaagaaagggcacccagcggccgggcgcggtggctcacgtctgtaatcccagcactttgggaggccgaggcgggcggatcacgaggtcaggagattgagaccatcctgactaacacggtaaaaccccgtctctactaaagatataacaaaaaattagccaggcgtggtgacgggcgcctgtagtcccagctactagggaggctgaggcaggagaatggcgtgaaccctggaggtggagcttgcagtgagccgagatcgccccactgcactccagcctgggcgacagagcgagactccgtgggtggggggcaggggggaagggcacctagctaggacgtttgatttaggacctggttggggccactgacccctgcccacccctgactgcagggtccttgagcccctaggaagggccaagatgggggtggggggcgccctggctccagacaccaatgttgggggtccttgtctccaaattgctgagcatgggaggctgtggcaggtgttggtgcagctggatggggaagacaccccgatcaaaagcgggaaccccgggtttagactcgacctcggtgggcggggctctggccaagagaagaaaaacggagtgggggtggtctgtgcgtggacactcgccaggggacgtggccagggcgtgtctgggatcttgcgccactgaagaggctcccagtcgtcaaatagagtgagggatgggatccaaaggacggcgagaaagcccgtggttgtctaaacgtccctggctccccgagaagcagtttcctcggggccttcctgccttttggatgaatggagatgctgtgtctgggtcactgccagagccggggcaggagaggacagaggcttcccggagcggcagggcccgtcgctagagggcggggcccgcagtcgggggcgggactttggcggcgctgtgcatggggattggcttttcgcaccgcccctccgctcgagtgggccaatcggagacggccccacctcctgccccgccgcgcgtattccagcaggtatgtgcgggcggacccgggactgccccgcgcgctccgtggcgccgcctcgaggtctgggacggtggaggtgggtggagagcccggagtgcaccccttgtggtccctgccgccttcggacctgggggaccctttactgtgcccctcaggtgtcacccacgaatgttcccatgttcctggggcgtcacgcaggtcccagccacatccaaatgtccccccttaagaactggggtttccttcatgtcacatccctcaaacccaagttcccctccagcattctcagataccaggcaccccaaatcttcccctgaggcctgagtaatcccgtaggtccaagttgcccccaaatgtcactagctcaagaccctcagatcctggttatcgccacatgtcacccctcaggctcagcgtttccctcagggtcaccccaccaccaccacttcagatcagcttccatcctcccttgatcagcgatgtgaaaatctttccactctagggtttccctcatggtcaccccacgatccaggacacccccaaggtcacctttccaagcacaggataccctgctgcacagagcaggtggggcagggatgggcaggcaggagcccggagtgccaggatggtaaattcaggccaatcaaaagctgaaactccagcgatgggaggcaggagtgaatcacagaccagaccttcaggaatgaagtcagggcaacttttatttacttgaacaacagacatgacacacagcacgatctctcctctccatcccatcccaagcttctgtccacgactacccagggtggggaaaaaggcaatggcccagccccgatgacctgggggacttcagtgtgcctcctcagtcccacccagaaaaaagcctcctcccatctgatttcaagatagtggagaaaagccaggcacggtggctcacacctgagccacctgtaattccggcgcattgggagactaaggtgggaggatggcttgtggccaggagttcgagaacagcctgggcaacatagtgagacctgcccccccatctctacaaaaattaaaattaaaaaaattagccaggtgtggtggcgcatacctgtagtcccagctctactggggaggctaaggcaggaggatcacttgtgcccaggaattcaaggttgcaatgagccatgatcacaccagcctggccaagatggtgaaaccccgtctctactaaaaatacaaagattagccgggcatggtggtgggtgcctgtaagcccagctactcaggaggctgaggcaggagaatcgcttgaacccaggaggcagaggttgcagtgagccaagatcacaccactgcacttcagcctgggcaacagagtgagactccgtctcaaaaacaaacaataaaaggccaggcacggtggctcacagctgtaatcccagcactttgggaggctaagacgagcagattgcttgaggtcaggagttcaagaccagtctgggtaacatggcgaaaccccgtctctacaaaacataaaaaaaaattggccgggcgcagtggctcatgcctgtaatcccaacactttgggtggctgaggcgggcagatcacctgaggtcaagagttcgagaccagcctggccaacatggcgaaactcggtctctactaaaaatacaaaaattagccaggtgcggtggtgtgcacctgtaatcccagctacttgggaggctgaggcaggagaatcgtgtgaactggggaggtggaggttgcagtgagccgagatcgagccattgcactccagcccgggtgacagtgcgagactccatctcaaaaaaaaaaaaacaaaaaaaaaaaaacagagtcctaactcttccctgccctgagaaccccctcaaggcagggaggatcagctattcccagcgcctcaggactaagcacacctgcttgtgtcccttctgggtccacaaggaacttgttccatgccccacatgtggggcgggtgtcactgctcctcccggcaagttagaaagctgcagggcccagcaagaaggggccaggtcaggtcaacccagcctgataccggaagccaggagttggcatttaacggtctggaggcccaaggcagcttcctcttgggtaactggctgctaggaaggtgcgggccgggccagtgcccctgccaggcttgggagaggaggggccaagcctccaggcccggaaaggacacagctggcttcccttttaatggaagggccacccactcacccacctatctatgctggcaccacagcccagcctgagctgtggccatgcaggggtccccagttgcagagttggggatcagggcctgcagcacacatttgggcccagccaaccccacccaccacatccctcctccagacacaggtctgattctgagtcctcatctctgctccaagcatcagcccacccagggaaggcaggggctgcaggctccaagggggcttgacccctgttcctgctgaactgagccagtgtacacaaaccaactgtgtttcagctcagtaggcacgggaggcagagcccagggaggccaggcagcaggatggcaggcagacaggcggcagcaggggacaggcggcaaggccagaggaggtgagggcctggggggcggaacttagccactgtgaacacgacttggtgtggaccctgctcacaagcagctaagccctgctcctcaggccaggcacaggcttcggggcctctctgccaccccgtccccgggcagcatcctcggtggcagagctcagggtcggttggaaatccctggcaatgtgatttgtgacaggaagcaaatcccatccccaggaaccccagccggccgtggcacaggggtgaggggggcaccgggcggggccagaggctggcacctggaggggagaaagagagagagagcaaaggaggtaatgagatttggggacacctcccctccaggtccccagatgcttcctttgatcacagggaagctcttttctcatatgcaggagccaccacacggggagctggagcctagctgtgccctccgttccagccccaggactggagaggcagagatacctagagggcccatgcgggacaaggaggctacagcaacttgcatggccaagctcccccctcattgagccctgggcaggccaaatggggccatggggagaggaagccaaggggggccaggcaggcgggtgaggaagtgatctcaccccagctggcgccacttcctagaagcctggagggcaggaggaaaccaccagggcctccccccccgtggcccggtctcctcagtggccagggcttagcccacacccaccagggcggatgccggcagcaaggcacccccctctctttctagacacgcaccccccgccccccagagcacaggatccaagctccaagatacaggcctctccacccaaacagcccaaggttcaaatccttgctccacagtttcccaaagactctccaaagcttcagtttccccatctgtaaaatggagccaagagcctcttttgcatagcccagtgagatgtcaccgagtatgtatgtcactcagtaagtgcccagcaccagggcaagatacaggattttcaggacccggtgcaaaatgaacacgtggtcctctagttcgaaaactaagaatttcaggccaagcatggcggctcacgcctgtaatcccagcactttgggaggccgaggcaggagagtcacctgaggccaggagttcaagaccagcctgcgcaatacgacaataccccatctctacaaaaaaaaaaaatattttttcttttttgagacagggtctcactctgtcgccacggctagagtgcaggggtgcaatcacagctcactgcagcctcagcctcccaggttcaagtgatcctcccaccttagcctccggggtagctgggactacagctatgcaccaccatgcccggctaattttttctttttcttttctttttttttttttttgagacagagtctcgccctgtcgcccaggctggagtgcaatggcgtgatctcggttcactgcaacctccacctccagagttcaagcaattctcctgcttcagcctcccgagtagctgggattacaggtgcccgccaccacgcccagttaagttttgtatttttagtagagacggggtttcaccatgttggccaggctggtctcgacctcctgacctcaggtgatccgcccacctcggctttccaaagtgctgggattacaggcgtgagccaccacacctggccctaatttttgtagagatggggttttgccatgttgcccagactggtctccaactcctgggctcaagcaatccgcctgcctcagcctcccaaagtgctgggcttacaggcctgagccacagtgtctggcccacaaaaaattcactaaaaaatcagccaggagtggtggtacacatctgtagccccagctactcaggcggctgaggtgggaggactgcttgagcccaggagtttgaggctgccgtgatctatgaccatgccactgaactccagcctaagtgacagagcaagaccctatctctaaaataaacaaaaacaagtttaaaaaaagaaaataatttcaggctgagcgcggtggctcatccctataatcccggcacttcgggaggccaagacaggaagatcgcttggggccaggagttcgagaccagcctgggcaatacaagacaaaaaaattaataataataaaaaaaaattcatgaccccagcagtgcaacattaaactaacctccaggtccctccaagcagggctgccgtgagactgcccgtttcacaaatgcatgaagccagccctaagtctttagtgagtggagcttcttttgataagagcccaacacctggctagcagactccagttttggagcccaagtctgcccagatttgaaagccccagctctgcagcttctgagctgggtgactctgggcaagtcactcaacctctctgggcctcagcttccccatctgcaaaacagggataataagtatggacttcataagtcatggtgaggaccccatgagtgataaacatgatcacgacagagctgctgctgtctttgccaaggcaaaggataacggaaacgtgggtgtctcacaccaggaccccagtgtccgcccgatgtggtggcgctcaccacttcgagacaggcggcgagtgatgtcctgttttgtcccctccctatacacacatacacacataccagccactctttcccatcaggccccagcccagccctgtccccttagggtctggaggcgccaactgggagcaggcgaggccccgcagggcggccagcctccctgggccgcctccggaagtgagacagcacattcgtgtcccagggacgagaacgggaagggcggccatttggccaggctcgtttcctgtggggtttcccctgcacagagcccagggccggggccaaggccactccccatccccgcaggcacaaaaggtctgggtcttgagtggaaggggtgctgccatgcaggtgcccaggagacagggtcccctttaccaatcatggtgcacttctcaggctcttgggagatggtgtccagggggaaaccaagctcctagcagctggaggcatgagggagagggcgggcccctgggctggggagcaaagcaggccccaggctgcatcaggacaccccggccagccaatgcatgtgggtatgcctgaataccccctccagacagcgtgtgcgtggaccagacacacaagggtatgtatgtgtaccgctacccccccaaccccatgctccaagaatgaatcaggggcagcttccgccgggggcgccaccaccacctccgcccccaagcctggtccccaaatactttccaccctcacagagcagctgggatcggaaaataccaagggctgcaggccccgccctgcccgccgcgccacccgccctcccagcctgtcactaacgctttgcctaatgggcccagactctcagcagaagctccgtgggctgggcctcgagccagccgccaacctgggctgcccggccaagcgccgcctgaccaggagccccccgcccctctgccccaatcccagtgcagcgacaataacaaccgccccgatgggcagccctcagagggtggcactgggtagggaaagtcagggcactgacaagtgggtgggccccgctgcccacccagggctggggtggggggaggctcaggaaggggtgagtaagtgagggctgaatcacttgttataaataggggaaccatgaaagtgacatcccagcccccattgcgtcccgccagtccacactctaacccccacttagactttaatctttcccagaccaatcacagaattcccaggggccccctcaccttcatgttgggaacccttagtagagtggtacaccccgtcatcaggtccacccctgccttctccccacataggtacattttgcagtgagggcctggctgtgggggtcccctggccttgaatgcagtcactggtgtctgcgccctatccacctccctcaacgcaccgattcccaggcccaaggctcagggcctctaggctctccaaggcattctcagggtgtgggccaccacagtcctggagggtgaccccagaacctaggccaggcgggaggccagggggcttggcatcttcgaagtcagttccccaggcaccgaggccccacatcctagaccacccagccctgctctgcccagggccacagctcagtgaccacacccagggtggcgccagctccagcaccctggggcaaggcgtcgctggagcgtgactcagccgtgcccagcatggcggcgcccttctctgcccagggattctcacccacacccactgccctccgctcaacatccttcccaggcgaccggccctaaaggacacaccttccccagacacacctccgtgtccacccaggacaccaggagggaagaaggcggccaggggcaaagtgtacacttctctccgtcccatttccaaatgcttcccatttatagatagaataattaaggctcagagattcagactggggcttaaggtcatggaataagtcttaaaaaaaaaaaaaaaaaaaagccaggcctgactgtggcctaaaacacatccaacgtggaaaacagaggttacaggaaggagttttctcaagatcgcccaaggttcctggcgccgttattcatggaggacagaatcccccacccagctttccaaggtgaagggcaaactccaaaaaatgctttaagaggtatcaaagcaccacctagatcgggcgagcgggtcaccccagtgtacccaccgggctaattaccctgggattgcagatagatgggggcctgccccgcagctgcggtctgcatggaacatctggcgtccacttgcattgttagagggtgggcacgacacgggggtccctcctaaagcatccgcctctgctgtctttctccagcgagcaagggtcggcggaggctcagtggccaggccagcacagacaggcccgaccctctggacacgccctgtcacgcatgtgctccgcgtgccagccccaggccaggccggcacctattttagggccccctctagatccacaggcaaggcctgcctgttggggtcttgaaggagctcccagaggacgtgctgcaagggcagagggccatgggtgcctcacgggatcagagaacaaagctagcaccagccccagggcctgtgccttcccaggacatcggcatgtgaacacatgtacccaggctggcccgggcagggcatgtgggcgagcggacagggtgtgtccaacatcacctcgcctctaagcctgggcacctgttgggtacagccctccagctggggcaggactgccagaggacaccccttatgccaggggtcccccagcccccagcctcaccctcatagaccaggagtcagaggctgccagctggggaaggttgggaagggggcaggtgacaaggagccagctgcacagccaaaacattcaagaagccactgggtctggggcctggctgggctgggctgggctgggctgggcaggaaggtcagttagggctaagggctttaggggcagccaaatctagtgctaaaatcagaaaacagtctggggctaagacagaggggtcggggttcagtctgggcccttttaacctcctccttcagccaaaaggcacggggaccccaagctgcacagggctggtccccaacctggctttccttcctatgcaaccttgaatgagcgcttttctccgaagggaaaggagacatccccccagctcccaccagcccctgcccaacaagagaccttccccctacccagcgggcgacacgtcaagaacttggaccggtatccacccccgcccccacccaaagaactctgagagacccccccaacccattcctcccgtccaaaggccaggtcggggggctaggagtggggtaggcatatgcatatccaagcccctcaacccaagccccatgtccgagccggacacaagccctcccaccctgacaactctctgcccaccttgacctgcccaagtcgcgcggggacccgccctccccaccgcattcccatgcgtcccctggggggtcggggtggaggggccactgggaagggaacagaggccgggccgcccttcccccgctccgtagggggcgccccgggactccgcggccgccgtcgccaccgtcagacgcactgtccccgatccccgacccaccccgggcggcggggcgctcaaggcgcgcggggcggcgccctcgccttctcgcaacgctcttggggacccgccgggcgcagccccactccgcccacgagccaggcgcggaaaagttgccggcgccgctgccgccgaggcgccgatcgctcccggcctccctcctgggtccctcctgacttccacttacccgcggggggaggggagccgggcgcgcactccgggctccggccgccgccccgggccgggccggccgaggctcaggcgggcgggctgcgggcccgagaccggccgggggcggccgccggccgcgctccaccccactcactggccggccagccgcggggccgaatcgcttttaaaaccttcccgtctcctccccccctccccgggccgggcagggggcgggcgcggggcggggcaggcgtcgccgtcatgtgcccccgagccggcccgcccccagtttctctgtcctgtcccccaactctgtcccgtcccccaactcaaggccaactttctccctccttgtcccgaaatcagcctgggccccatacccagcccaacttccccctctggaccctgaacttgagtcccagtcccgagttttaagcccaaggctctgtctgcgggggtagggtgggagcaaagggtctaaccccctatcccacctctggaacccctgttggtctaaggcctgcgcctgcccagggagaggcaacccaggaggccgtgagcccctgggaatagagattggtgaggggcggtttggcgggtgggctcggtcccagacccagggcacactgggcactgcagacccctcccggggaggggggcctgggtctgggtattgccctgggatgccaccaaacaggaacccccacttgctccagttccacagcgccttctccagccttaggaagttcctcctcttatcctacctaaccctctcctgctgccatagaaaagactttctggtcccaggccatgcagcccctgggtctgggtcccctccccctaggcttcccggcaccctcccccacccgctgggacctctgggaaactccccgggctcccggagtagctctgggagcaaggccctccctggatccctccctctttcccggtgtgcctgtctttcccgctccatcctccagcctccaccgggaggaacgcggctgcattgttcctcaggaggaggccctgcctcggggcctggcccagtgcccaggtgggtggccaggaacaaaactctgagatcgaggggcggggtgccctctgcaaccatgccagtctccttgggcatgtcccgctgccatctgccctctccaggactcgacaaaggccgatggacccctatccaccacccacgaccaccatcgtgtcacagtgggggtctggaacccgcaggacccttcccagacctgggtgggcattgctttgggggatgatgttttccactcagcccccaatatttttgaagtgtcatccttggggctagggatccaattcttcatccacgtcctgggtggtaagatagcagcctccccttttgagtaactctgggggtgggggcgcgggggtacccagcagcaggccaggccctccaagggactggagggactagttggatgcttctgtgtcaccttgcaccccagaattcctccagggtcccccatttcatcagctcagctggctctcaccttgctacctggtggaactggggagagggagttaggagccacacccagctaccatcccgtggggcccagccctggggactccagggccttttcttccctgtggggcccaaggggcaggctggcccaggatgcaggatctgacaggttggggcaggagggggcagagccgcctagtggggccccaggggaagatttggggtggcacagaattccccaactcagggtggggcgcagaaggtgggagcaacttaccacatggccttctgagcagctacacacaagaatggcatttccagggcgggcctggggtgggggtgggggtctccctgtaagggacacacgcacacagacaaacttgtcattgcaaaagtagaaagtgaccaaattacaatgacaaacaaaactcggatctctaccgcatccccatccatattgcccctccagaattcccttcaccccataataaggccttccatccagacattgcctgtcccgtcatcagtccaattcacattcagggagaacacctcctccatgctggcctctggggatacctcttcccccagattttttttttatctaattttcgctgttctgttgcctgtggcttggaccacaccccggctcactagtatccctcagcccaggcttggagggtcctcccagaacccccacctctccctctgggtcccttgacatttacttccacaggccccggtcctgagcctgccggtttacccaggggacagcaggtgagggagtgatgaagggacagggcgaaggtgagaccaggtcaagtggtcaaatggcatggcacacacacacacacacacacacacacacacacacaccacacacccttttgttcattctacaaacattgagtgcctgctgtatgtatgtcaggctctgttccgggcatttggggacacagaagagaacaaaacagaaaaaaaaatccctgtacttttgggaccagcatctatgggagaaacaaacatgataagcagatagataggtataaagatatataatgtggccaggagcggtggctcatgcctgtcttcccagcactttgggaggctgaggcagcctgatcacttgaggtcgggagttcgagacaagcctggccaacatggtgaaaccccgtctctactaaaaatacaacaattagccgggcatggtggcgcacgcctgtacccagctactcgggaggctgaggcaggagaatcatttgaaccaggaggcggaggttgtagtgagccaagattgctccactggactccagcctgagcgacacagggaaaccctgtctcaaaaaaaaattatatatctatatatatttttaaaaattacatatctatatatttaaaaattatatatctatatatattttaaaattatgtgtctatatgtttaaaaattatatatatattgttttaaattatattatatatatatatatatatatatataaaatgtgttgggtggaaagtctatgggtaatctagaaaaaggcaagagagatgagagatgaaatgagtggaggttaggtcaggaaagtcctccctgaggaggaggtgactttgaacaaagacttttaggcactgagggaaaagccaggaagacatcgagaggaagagagttccaggtagagaacggccagtgcacaggctttgcggtaggacggtgcctggaacattggaaaaccagcaaagcagaccggtttcatggaggcagagagaggagtggaatggaagaagaacaaagatttgttttgttttgttttgtttgagaaggagtctcactctgtcgcccaggctggagtgcattgtcacaatcttggctcactgaaacctctgcctccccagttcaagcgattctcctgcctcagcctcccaagtagctgggattacaggcgtgcaccaccatgctcggctaatttttctatttttagtagagacagggtttcaccatattggccaggctgatcttgaactcctgacttcaagtgatccgcccgcctcagcctcccaaagtgctgggatgacaggtgtgagccacagcgccaggccctacaccccagctttctagctggatgtctttgggatggctttggggccaggcgattacacttcctaagcctcagttttgtcggctgaaaaatggggctgaaaatgcgcaatttgcagttgttaccaggctttgaggtgagacgtgtgatgtgctgatcgcaggtagaaagagggtaagtgatacaccaggtacacctggatcaagggaccctgacaggcccagccggcccacaggtcaccccagctcacatgcagggctgcctgctgggccccatggcaacgccacacacagagacatcaaacaggccctgccgaggaagtcccacgtcactgcggttagagtggctcctcccagcccagcccccggctggcggcagtgacccccatgccagtcagggcccctgcctcctgttgccctggcgaccagctgtgttatggactgagccgggatcccaccacatccctgccccctcaccagggcaccagccactccccacatccggagaaggacattacacggtggccccagctcaccgtgacaaactcaattgcctggtgtctggagcaccaggaaagactttgtctacctacataatggttcagaagggcagagaggtcccagggatctgtggggactcccagccaggtgcctgaaatccccggggaagggtcccagtattgctcaagggcactggtggggcaggtcagacaggaatagaccccaggcctggcccagcccccacctcaggaatgactcaccacccacccagctcccgatgacatcaaggcctggcctgccaccctgacctggccccaggccagaactgggggggcgcacccaagaagtgtcacatctggctgtccctgcctggctgggatctggtacgcagagggttaaggagagcccttctgggggtctcccccccatcccatcccccccactttcccggggatttcgggccccagcccctctgacgtcactgggggttgctatggcaactggccgaagttcccaaataaaattaccgcgggcgggttaagtttcctaggaggcagccgacgggtaaacaatggcggtggcaggcggggccggcgagaggccgtctccccctcttacccccgactctgctgggacctgggggtccctggggcgaggggcagggtccccctccctgcccaggatctgagagccctcgagccagcgaggggattggcgcccagatgagggacagcgaggccacgacccacatgagcgggggatggggacgaggggtctttggaggggaggctggggcggcggggaacaaagaggggaccggaggcctggggatccaccctccacacaccctcccccctaaccccgctcccggccggccgccagtccagctgtggctgttcccagctccctggctccccacatctggcgggccgcgcgctcacttcctgtcgccccggctgcctggagggaggtaaaaataacccgccccctccccctgccggcggcgcagacggcggatcctcccagcctggaggagggcgaggccgagcctcagccgggagaggaggccccctgaggccgcctcccgtccctcccagtgcctcgctgtcctggcaggaggggggcaagtaggggtgccacagagcctaggctgcgctgggggactggggaagcgcatcccatgagaaaggcccttagctgggtcaccaggaacccagggaaccatagtgtccaaccacccccaccaatcccgtgggggagggggttcaagttctgagagttgagggactgcagccaacatgcctgggttccaatcgagggtcacccacttcctaacctaacagtataaacaagttaccaaaaaaaaaaaaaagccccccccccgcacacacacgacaagagcaaaactgctccaggcctcagtttacctagctgtaaaatgggcatgatagcagtactcacttcaaagtgcatttgttgggttaggagtgtcaactcactctataatcccaaaactttgggaggctgtggcaggaggatcgcttgaacttaggagtttgagaccagcctaggcaacatagtgagacccccatctctacgaaaaagtgaataagtaaaatgaaaacacataaaaaagaaaaataaagtgcatttattccctgagtgttagctatgatcgtttccccctccccaggggcccctgagacccacccccctccaccaagtacagttcccagatgagacacaggacacccagtgaaacttaatttttcagatacacagcggatctctttttttagtataagtatgtcccatgcaattttggggacatcgctatactaaaaaaaaagttttatactaaaaaaaaattacttgttctgtatctgaaattcaaatttaactgatgtcctgtattttttatttgttaaatctgccaactgtatccttaagtcaccatcatctctggcctaaatatattccaacagccacctccctggtcctctccgactttccttatgccttctagccattctccagagacagcccgttaaatccaatcacgtgtcccctctaccttccacttggaaaagttcctggtgtcccaacctctcccgcaggaaggtcctgcctgttattcgccaactcccgagcatccttcagttcccagggtatcacctcctccgagaagccctcctcaccttcttggctttagactgtccaggatccctgtaactcagccatctccccaactcaaccatttgagtgattgacttggtcatgtgagccaaatggacatttcttacaggactcaaagctggtcacttcccaggcagctggtccatctccgtgtctgagatgctagtatctactcttctccccgccccataggatctggggctccggaaggcccctcaggcagctcccttaagggtcctgtgggcggctcagtggtgactattggggtgccagggagcccggagttcaggccatctgaagctggtgctgggaaactctctccctgcactcagatggcatgggaagtctaggggggtgctggtgcaacctctgtagtgcacagccttcagtatcatgtgtcgacagcccccaaggagcccaccaggcgccatcccccacttgcataacctacccacacttcaatgtagccttggcacctatccccacaacgcctgaagactcccacagatatggccctgccaaggccaggcatgcaccctcctgagacaggtttgggagcccggatgccagcttggctgtgcatcctctggcaaaggacattgaccctctgttgactcagtttccccatctgtaaaatgagaatgtcaatgaaacgtcagagggccatggtgaacactatttttaatttttattattattattttttgagacggagtttcactcttgtcacccaggctggagtgcagtggcacgatcttggcccactgcaacctctgcctcccgggttcaagcgattctcctgcctcggtctcccaagtagctgggattagaggtgctggccatcacgctcggctaatttttgtatttttagtacagacggggtttcaccattttgcccaggctggtcttgaactcctgacatcaagtgatccacgggcttcggcttcctaaagtgctgggattataggcgtgagccgccgcgcccgacttcatggtgaacattacatgagttaatacacataggcccacacatgcatagaacaggcttagaacatagaacgtgctcattaagtgttagctagtttgggaggtcggcaggggtggggaggatgcaaaaaagccctcatcacagcgctcctgacagctcccgccaggccagctccccaaatcccttaggaaaatggcctcgacctctcagctgcaactctggcccagccgccatctcctgacctgaccgcccacttctggggagccccggtgggtctggattggagagagccaccctcagccctccccaccttcattggaccacagctgtctccttcaccatcacctccgtgcccaccaggattacaggcctgatctgaacccctaatctagggaagactacggagtcccaaaatccctcttagcgcgcaccccggcctgaggctcgaacccaggtccgcgctggagggcggtggcggttgccgagcaacgcgctgtttgttggcgcggggggcggggccggggccggcgcgcggtgactcaccgcggcgtgatgcggacgggcgcggcgcccagcagcctggccggcggcccgatctcggctggcctcggcgtccggaggggcccggcggcgggggcgccttagcccccaagtgggcgccggaggcccgtggggaagcggcggagcaggtcccgggctctcggactcggttcgaatcccagccctgcctcttactcttgactcttgatctgtgacttcaaggctccttgcctcagtttacccgtcagtaaaagaagcgacactggagggtgcagtaacccaccactggcatttaaagcagctgagatgatcacgcagtgacactgcggggcagcaagtttgggacacccagattctgcacgtgaatctcctgtgttaaactctgcaacctcacggagaatcaatttccgcatctgttacagggcagtagcaagaacaaacaccctgcctctcgggtggtttgagaatcccgtgaattcatagtgagacaatgcgtggcacatttcagtaccatgtctgctgccccacggagggacgggatgtaggaggttttctctgtggtccgagctcaggagggcaaggaggtgagggcaagactggaacccctagaagtgggtggcaagtcacaggtccagggcagggtggcatgaccatggctgcagaggcccctatcccgaagctggctcacagcacctgctgcgggcaggcagaaggggggcctgggggtgagtcaccgcccagcaatgaggcttgagtcacacagggcggggtcccccgttagcccccccagctgctcccacaaaggccctttgagaagagttccccaccccctactcccaccccctaggccctctctaggggtgggctgtggggccgaggccctgctgggctgcccccaggagcccggcctgggtctgggaggcgccagccagtttcagccatgtctgtgaaaagtcaccataggaagctgggtgtcccccggggagggggcttccaggctgcctgagtcactggaatggtggagggtcacacgcgcagggcccacgcacacagcgggcaaattgagtcagactgtctggtggggcgggcaggccaggacgcttcgagtcaggctgagaaggaaacctgggaagagacatggttcttccaagcctgtggcctctggcagagaaagagggtgcttgagggcacatatggtgggtttcaccacacctcctgcctaggcctcccctccttgcctgccccgaaacagtctcccccacctttctatccttcttaaacttggagtgagaaggacagcaagctggatgggattccagggaggcactctactagcggaagaattgagatttttttttttaattttattatttatttatttatatttatttacttttttttttgagactgagtctcaccctgtcacccaggctggagtgcagtagcacaatctcggctcactgcaacctctgcctcccaggttcaagcgattctcctgcttcagcctcccaagtagctgggactacgagcacacgccaccatgcccaactaatttttgtagttttagtagagatggggtttcaccatgttggccagggcagtctcgaactcctgacctcaggtgatccgcctgccttggcctcccaaagtgctgggattaaaggcgtgagctactgcgcctggccaatttgtatttatttatgtattgagacagggtctcattgtgtcgcccaggctggagtgcagtggcacaatcacgtcttactgcagcctcgacctcctgaactcagctgagcctcccacctcagcctcccaagtagctgggaccacaggtgagagcgaccacacccagctaatttttgtatttttttttttttttttgtagagacagggttatgctgtgttgcccaggcgggtctggaattcctgactcgaattcctgccctcaagagttccgcccaccttagcctcctaaagtgctgggattacaggcatgagcccctgggccctgacctgtttgtttattttttagagataggggtgtctccatgttgccctggctggcctcaaactcctgggtttaagggatcctcccgagtagctgggaatacaggcaaatatgtccacacccagctttaagataaaaaaaaattattattatttaatatttatttatttattgagatggagtctctgtcacccaggctggagtgcagtggcgcgatctcggctcactgcagcctccacctcccaggttaaagcgattctcctgcctcagcctctgaagtagctgagactacaggcgtgtgccaccatgcctggctaattttttgtattttttaagtagagacggggtttcgccatgttagctaggatggtctcgatctcctgacctggtgatccacctgcctcggcctcccaaagtgctgggattacaggcgtgagccaccacgcccagcccaggatcaaaattttttaagacaaggtctcaccactgccatctcaagctccggggctcaaaggatccttctacctcaacctccagagtagctggaactacaggtgagcaccaccacacctggctaatttatttatcttgtgggggtcggggcgtgagggtcttgctgtgttgcctagactggtctccaactcctggccttaagtgagcctcctgcctcagcctcccaagtagctaggactacaggcatgtgcaagcacacccagcttatttatacacatttattttattttattttattttatttttttttagagacagggtcttactatgtttcccaggctggtcttgaattcctggtctcaaccaatcctcctcctgcattggtctcccaaagtgctggtattacaggcatgagccacctcggctgaccactttgctttttctatttgttgactgagatggctataaagggactaacagactggtagcctatacagacagcatggataagctgggtaaagggatgattcacatcccaggactgtgggagatttcatcacactactcagaacggcctggaatgtgaaggtatgacttgttttatttctggaattttctttcttttttttttttctgagaccgagtctcgctctgtcacccaggctggagtgcagtggtgtgatctctgctcattgcaacctctgcctaccgtgttcaggccattcacctgcctcagcctcccgagtagctgggattacaggcgcgtgccaccacgcccggttaatttttgtatttttagtagaggcggggtttcaccatgttggccaggctggtctcgaactcctgacgtcaggtgatccgcctgcctcggccccccaaaatgctgggattaaaggcgtgagccacctcgcccagcctctggaattttccatttaatatttttggaccaaagttgaccaaggataactgaaaccgaggaaatcgaaactgcagataagggggacgactgtatacagtcaaatgtgtttagaatattcatagacttatgcaaccatcaccacaataaattttagaacattcctttttttttggagacagagtctcactctgtcacccaggcaggagtgcagtggtgtgatctcggctcactgcaacctccgcctcccaggttcaagcgattctcctgcctcagcctcccaagtagctgggattacaggcgagcaccaccacgcccagctaatttttgtatttttagtagagacagggtttcaccatgttggccagactggtctcgaactcctgacctagtaatctgcccgccttggcctccggaagtgctgggattacaggcgtgagccactgtgcctggtccacaccagctaattttttgtattttagtagagatgaggtttcaccgtgttgcccagcctagtctccaactcctgagctcaggcaatccgcctgcatcagccttccaaaattctgggattagaggcaggagccactacgcccggccttttttttcgctgaggcaggatcttactgtgtagcccagagtggagtgcagtggcggcatcctggctcattgcaaccactgcctcccgggctcaagcaatcctcccacctcagcctttggaatagctgagactgcaggcgcccgccaccacgcccagctaattttttttttttttttttttttttttttgagacggagtctacctctgtcgcccaggctgcagtgcagtggcgccatctctgctcactgcaagctccgcctcccgggttcacgccattctcctgcctcagccttccgagtagctgggactacaggcgcccgttaccacgcctggctaattttttgtatttttagtggagacggggtttcaccgtgttagccaggatggtctcaatctcctgacctcgtgatccgcaagattacaggcgtgagccaccgcgcctggccatttttttttttttttttttttaaagacagggcgttgctatgttgctcaggctgttctcaaacacctgggctcaagcagtcctcccacatcggccttccaaagtgctgggattacagcatgagtgaccacgccctgcccaactttagaacatttccatcacccgcaaaagaaatctcaagcccattagaaatcattttctggccgggtgtggtggctcacgcctgtaaccccagcactttgggaggccaaggcaggtggatcacctgaggtcaggagttcgagaccagcctggccaacacggtgaaaccccgtctctactaacaatacaaaaattagtcaggtatggtggcacatgcctgtagtcccagctattcgggaggctgagttgggagaatcacttgaacccgggaggcagaggttgcagtgagccgagatcatgccactgcactccatcctgggtgacagagcgagactctgtctcaaaaaaagaaaggaaagaaaggaaggaaaggaaagaaaaggaaaagagaagagaaaagaaatcactttctatttcaccccccaacattctcagcctctggcaaccctggtctactttttgtctctgagtataaatgctgtcaacagagttcatccatgttataacaagtgtaacaagcgtgagtaccttattcctttttattgccaaataatatgtgatacgggctgggtgtggtggcccatgcctgtaatcccagtactttgggaggctgaggtgggaggatcacttcacctcaggagcttgagaccagcctgggcaatgtagtgaaaccctatccctacaaaaattacaaaaattagctgggcatggtggtcctcgcctgtagtcccagctactcaggacactggggcaagaggatcacttgagcccaggaggtcgaggctgcaatgggctaggattcttttactgtactccagcctgggcaacagagtgagactttgtttctaaaatgacgagacctcgtttctaaaataaaaatgaggctgggcggggtggctcatgcctgtgatcccaacactttaggaggctgaggcaggtggatgacttgagctcagtagttcaagaccagccgggccaacatggtgaaacctgtctctactaaaaatacaaaaattagccaggcatggtggcgggcacctttaataccagctacttgggaggctgaggcaggagaatcgcttgaacgtgggaggcccaggttgcagtgagccgagattgcaccattgcactccagcctgggcaacagagcaagacttcgtctcaaaaaaaaaaaaaaaaaaaaaaaaagctgggcgtggtggcacgtgcctgtaatcccagctactccggaggctgaggcaggagaatctcttgaacccgggaggcagaggttgcagtgagccgagatcacgccactgcactccagcctgggcgacacagtgagactctgtctcaaaaataaataaataaataaataaatataaaataaaaatgaaaataaaatagaccaaagctatgtcccaggaacaaagtatttgagaagcagatgctgtctcacaaagaagactgagacagagaagggatgtcaggaggatctagtgtcccaaggccaaggaggaaccaggcaaaggtgacagatactacacggagctcaaggacagctacagctgagaacttggcctgactctgaagtctgatatcagtagtgtgatcaggcagccgcctgataagtaaatgggagggaaggcaataaaggcagtgtctaaagaaatatattgtgagccacaaatgcaagccacatatgtaatgaaaacttttttagtagccacatttttttaaaaaagtagcaggtgaaattaattttattttattcacatttatttatttatttttgagacacagtatcactctgtcacgcagaatggagtgcagtggtaggatctcggctcactgtaacctctgcctcccaggttcaagtgattctcctgcctcagcttcccaagtagttgggattacaggtgcgtgccaccacacccagccaattttatatttttagtagagacggggttttgccatgttggccaggctggttttgaactcctgaccacaagtgatccacctgcctcagcctcccaaagtgctgggattgcgggcataaactagtgagcctgccaaaattaattttttttttttgagacggagtcttgctctgttgcccaggctggagcgcagtggcacgatcttggctcactgcaacctctgcctcccgggtttaagtgattctcctgcctcagcctcccaagcagtcaggattacaggtgtatgtcaccatgcccagccaattttatatttttagtagagacggggtttcgccatgttggccaggctggttttgaactcctgacctcaagtgatctgcctgcctcagcctcctaaagtgctgggattacaggcatgagccagtgagcctgccagaattatttttttttttaatttgagacggagtcttgtcctgttgcccaggctggagtgcagtggcatggtctcagctcattgcaacctccacttcctgggttcaagtgattttcctgcctcagcctccaagtagctgggattgcaggtgcctgccaccacacctggctaatttttgtatttttagtagagacggagtttcaccatgttggccaggctggtcttgaactcctgacctcaggtgatccacccgcctcggcctcccaaagtgctgggattacaggtgtgagttactacacttggctacaaaattaattttaataagattttatttaactgagtatatccaaaatagtatccttttaacatataatcaaggtaaatattatgaatgagatatttcagttttttggtactgtcttcaaaaatctgatgtggattttatacttataacatctcaattcaaactgttaggttggtgcaaagtaattgtggttcttgccatcattactttctttctttcttttctttttttttttttttgagacggagtctcaccctgtcccccaggctggagtgcagtggtgcgatctcagctaatgcaagctccgcctcccaggttcacgccattctcctgcctcagcctcccgagtagctgggactacaggcacccgccactacacctggctattttttttgtatttttagtagagacggggtttcaccgtgttaggatggtctcgatctcctgaccttgtgatccacccgcctcagcctcccaaagtgctgggattacaggcataagccaccgcgcctgctttttttttttttttttttttttttgaggaagagtcttgctctgttgccaggctggagtgcagtggcacagtctcggttcactgcaacctctgcctcccgggttcaagcgattctcctgcctcagcctcccgagtagctgggattacaggcatgcaccaccacacctggctaatttttgtgtttttagtagagacggggttgcaccatgatggccaggctggtctcaaactcctgacctcaggtatccaccctcctcggcctcccaaagtgctgggattacaggcgtgagccactgcacccggctgccattacttcgaagaatagctgtatttcaggtgctcagtagccacgtgaccagtagtaacgtcattggaaaatgcagtccagacaggcccgagtcctgcccttgtgtgactcatgtcactcacctatccctaatcccagctctgttggatcctatctttattgaaaaaaacaattttttttttctagacagggtggaatgcagtggtgtgatcatggctcactgcagcctccacctctggagctcaaccagtcctctcacttctgcctctgaatagctgggaccacaagcgtacaccaccacgcccagctaatttttaaaatttttgtagaggccgggtgcggtggctcatacctataatcccagcacttcgggaggccaaggcgagcggatcacttgaggtcaagagtttgagaccagcctagccaacatggcaaaaccccatttctactaaaaatacaaaaattagctgagcatggtggcgggcgcctgtaatcccagctactctggaggctgaggcacgagaatcgcttaaacctgggagagatgattgcaataagccgagatcatgccactgcactccagcctgggcaacagagtgagactccgtctcaaaaaacaaaacaaaataaaataaaataataaaacccttgattgggcatggtggctcatgcttgtaatcccaagactttgggaggctgaggagggtggatcatttgagcccagtagtttgagaccagcctgagcaacatagtgagacactgtcactacaaaaaaatttaaaaattagccaggtgtggtggtgtgtgccagtagtcccagctagttgggaggctggggcaggagaattgccgaaacccaggttgaggcctcaatgggctaggagtgtgctactgaactccagcctgggcaacacagcaagatcccgtttctaaaaaacaaatcaaacaaacaaaaatccctaagccttctcatcatacttaaatccaaactccttactgatcaaggacctataagacgtcacctcctcaaaagccttcccagattgcactttcatcttccaggctgggccttgactctcagcactgaaaactcttcattgtaattggctagctacatgactagccccctgccagatggtggcaggcaagctcctagtctgttttgtccctcccccacttcccatcatctcaccccacatgcatgccaggaacatagtgattattaatgcattaattcactagatattgactaagggccttttttaagttctccagcagtgatgaagacaaacgttgtaggctgggcacggtggctcatacctgtcatcccagcactttgggagactgaggcaggaggatcgcttgagcccaggagttcgagactgccctgggcaacaaagtgagacccacccccatctctccaaaaaaaaaaaaaaaaaaaaaaaagacaacagctattgtgctggcagagctgacaatcaagtacaggagacagacaagaaacaagatgtgtagtaaaacatgtagtgtgttgaaaggtgacagggccaggcgcggtggctcacgcctgtaatcccagcactttgggaggccgaggcaggcggatcacgaggtcaagagtttgagaccagcctggccaacatagtgaaaccccgtctctactaaaaatacaaaaaattagccgggcatggtggtggcacctgtaatcccagcgacttgggaggctgaggcaggagaatggcttgaacccgggagcggaggttgcagtgagccgagatcgcgccattgcacttcagcctgggcgacagcgagactccatctcaaaaaaaaaaaaaaaaaaaaaaaaaggtgacagggttgtgagaaataaatagaggagaaagcaaggtgggtgcaattttgaaataggggagtcggccgggctccatctgtaattccagcactttgggaggctgaggtgggcggattgcctgagctcaggagtttgagaccagcctgggtaacatggtgaaaccctgtctctactaaaaatacaaaaaaaattagctgggtgtcgtggtggttgcctgtaatcccagctgaggaggtctggaatggggtgaatgagggagggagtggagagggtgaggcagagaggagacaggagactgtgcaaagccttctgggtcctggggaggactttggcttttgctctgaataaggtgggagccattgagggttctgagcagaggagggactggacctgacttgggtgctcacaggcgccccgccccggctgctgtggtggggaggggattagggggatggggacagactgtcgggggctgcaaggtgtgcagagaggtggcaactggagcaattctggggagagatgatggaagccggaccagggtgggccttggagaagtcaggattctggatgcattagaagggacagtaactagcctgggagcagtggctcatgcctgtaatcccagcactttaagaggccaagacgggtggattgcttgagtctaggagttcgagaccagcctgggcaacatagcaagacctatctctactaaaaatacaaaaaaatcagccaggcgtggtggcaggtgcctgttgccccaactatttgggaggctgaaagaaatgggaggatggcttgaatccgggaggcggaggatacagtgagcagagatcgtgccactgtactccagcctgggcgatagagccagaccctgtttcagaagaaaaaaaaaaaaaggacagtaagcaaaattgttaatgggttgcatctgttaataaaagtttttgtctgagcagctgggaggatggagctgccatttccggagaccgggaagatggcgggagaccgtttgcagttgaggaaatgagctctgagcccagggcttcgttctggccctgaagtgtccctgcccagactctggtggggtgcggaggaaagcacccacatggcctaggctttgcctcctcggggctttctctcggtcgatgcctgagtgtgcaaactacacccacatctgagtatacaggggcacctccgaagacccccacggcctgacacatccacccagtgtccaatggccacagccttgggggacttcgggggctggagttccgggctgatggagttgagaagggctgcctggctcttacacccaccttgggtccccacggagacccccaaggggacaggaggtgaaatctcccagggagaggttcaggaagagctgctgctgtgtcgcagccctgggctccccctatgagtcagcactggcaggggccccaggaactggggaccgggggtgtgtaggggggagggcagttcccacgccctaaggcgtctggggcgctggggcttcccccaccgctcctcccatcctgtgctgggctctggggatcttcagaggagtctggggggtgagaagcccagggcggattggccactgggccaggatccaggaatcctctctcctggtctgacccagttcaggaatgcagaggccgcccgccccggcaaatgcgttgcagcaagaaggagagttagacgtagagaaacaccgagtgagttggacatttgtgtggacggcacttctagggggctttatttaagaaggggcccttccttctggggactctgcatttgagcagtggaggctccagcctggggtgtccaggcagagtcctcagctaccgtggagtgggaggtggcggggaggagggggaggagactgcgctgagagctgagatcagtcccgccggcctccacagctgggagggcgctggactctgctgccccctgctggtggctgcaggaaattcagcgagcaggacagctggccggtcctggagaagagacggggggaaaggcctcgcacagaaagaattccagctctgccttttttttttcttttttctttttttttgagacggagtctcgctctgtggcccaggctggagtgcagtggcacaatctcggctcactgcaacctccgcctcccgggttcaagtgattctcatgctttagcttcctgagtagctgggattataggcgcgtgccaccacgcccggctaatttttgtgtttttagtagagaagagatttcaccatgttggtcaggctggtctcgaactcctgacctcgtgatccgcccgcctcggcctcccaaaatgctgtgattacaggtgtgagccaccacgcctggccccagccctgcctcttacaggcggtaccaccttgggcaagggcaggccccatctgggcctcggttgcccatctgtggaaagggcagtattcacttcattggcctgctgggaagaatctgagatgatgataggcattcctgggaccaggaagaaggttcgaagatacagctggggagaactctaccctgggcccacccttctaaagagaatagtccctgcctcaagggttgctctggtctggatgggagacgaggctcatacacgtctatgagtggatgaatgagtgaatgaataaatgtgaatgttgcatattccaaagcaagtccctccccaaccccttccgcctctttttctaagagaggaactctttccccaatacgctcttttttttagagatgaagtctctgtctgttgcacaggctggagtacagtggcaccatcatagctcattgtagccttgaactcctgggctcaacggatccttttgcttcagcctcccaagtagctgggactataggcgctcaccaccacacccagctaattttttttttaattttatttttgtagagacagtgtctcgctgtgttgcccagactggtcttgaactcctggcctcaagcgattctcctgcctcggcctcccaaagtgctgggattacaggcttgagccactgtgcccggccccccttgcctcttttctgtaagaagggctggccggcaggggggcgggcggcacaggagggccatcaacagagctgactggccccccccaaccccatggaggtatgattactagattgcaatgaactcccattctctcccctgcacgtgtctctccatccccactctgggagaagacttcctttgggagaggttaggtgtagactacagctggcccctctaacctttggtggggttgggggtcgggggagtggtcctggagacatccactctcctggacctggaaccagactttctgggctgagacctgaaggcagctggacgatgtgggagggtgaacctgtcaaggagaaactgaggcaggactgtggtggaggaggctgaaaggaagtgaggggtgcgcgatcaggtggggaagggccatggccccataagggttaaggtctgggcttggaagggggccagtcaaaggtttctccatccccctctcagactggggtgggggataaataaacagaatgagaaatctgtcagctcagcccgggccaatgggaggctgcctggcgccatggtttgccctgatgtgaccttcctctaccagccgcggtggccactgcgggcaggggcagtgtgtggagcctcagccagggtacgatcattccagccttgtgcatgctcttatacctgggcagggggaggggggatgtctggggaggagtaccgtctgtgcaaggatctttgggagatccggggagccccatcctttgtacagcttgcatgtggtctgtgcacctggcctgtatatatgcttgtgcctcatggtcccaggtacacatccccacgtgcccctgaattgcgtgtgtccatgtggacccctgtggctctgggacctgctgggggtcttgtgcatgtggctgttggctgtgtttctctgcctctgcgactggtccatttgacccgagtggctgtgcatatatgtgtgtgtctgtgaactttgtggatctgtgtctccatgggtgtgttctggttctatgtctatatccatgtattaggttattttgtgtgtgtcacggtgctcctgtggctgtgtacctggggtactgtgtgtgtatgttggggggtatatctcaggtctgtggataccccagtgcgtctgtgatctcctgcgtgtccgtgtgtcttgtgtgagctgtgcgtgcccggggttcagccgcgtttctgcatatttcggttctaaggaccttccctcctgtcctgaatgtggtgtgtctgtgtaccttgcatgtgtctggtgcccccgggtgtccctctgtgtgtagctgggttttatgaccaccctcgtgcggcccggcacgcccgcacgtcccgccaccccctcccttgggtgtgtgtctcgcagccccctgcacaccgttccctatgtctgtggcccgcgtgcctttgtgcgcgtgtgctccccccggcgcctttgaggtctgcgtgcgtctgggtccctgcgtgtgcccgcccgcgcccccgtgtccctgattcccccgcgcgggccccgggagctgcgttttggagacccacgggcatcccccgagtgcgtcccggtgcgcctggcaggaggcctcgggacgcgcacggccgcggctggacccaccgcccggcgcggcgcggggaggagggagggggcggcggcagcggggagcgcgggcacgtcaccgagacagacaggcgggcgggcggcggcggccacgggttcgagccggcgccggagccccgcggccccctccccccccccgcccacggcctagggagcccccgccctgccccggagccgccgaaatgcaatttcccgtgcaggcgcctcgggcccggggggcttttccgggcgggttttggaaagaagagggggaaatgcggcggcggccccaatcgaggtgagcgcgggcgccgggcgggccgggggcacgggcggggcgggggccgcccgcgggcagggggcgcggcggggcggggcgggacgcggccgcagccccctcgcgcacctgctcgcagccccggggcgggcgccccggcctctgcggcccggccctccattgttgttggggcttggaaggggggcggggaggccccggcggcatctctgcgtctcgcctttccggagagggggcgccgggagggtcggactctgcaaaggggacagacccccgagtcccggagccggggccgccagggggagggcaagcggagatgccctcgcggggcggggacgcgcgatggggggcgtggggacagcggcgccccgaccgcccgacacctgaccgcgcgcggggaggccacgggccggggcggcggcgagctttgttcttgggggcgcggggcgggtggggcgctcggaaatcgaatgccagaagagagtacggcccggcgcgcgcgcgttcgtgaaggctgctccggccaagttcatgggcgctcgggcctgcggagaccgatcctggcgggggccccgctcaggcctggccgcgggctgggggtgctgcagccgcgccacctccggaagccctggcgccctgcgcgggccgcccctccggcctgtcattaccggcagcagctgcagggtatttactggggccaaggtttgcgaacaggaacccgccctccaaaactggccataaaaagggaaaatggccccgaatcccactgccggggagcccttttaaagctacagggcgcctttcacggcgacctgccctggagggcaggctgggggtgggggggtggaaaagacacctcattggctgatagggactgagacgtcccccccacggtcccacacttcggttcccctccccccatctctttccctacccattccacacccctggactgctcacagatgcattaagccagccacgattagatattcccaaggccctgatggagacccccaaaattacacgctatacacagacatacagcaccccgattaatacgcagtcgaaagtgatgctgacacacacatacagtccccacaataacactgccacgtgtgtagacacgtcacccacaagggctcggacatccagggatagtgcccattgaaaggctgtcacacagaaatggagccaccaacgaaggcagctacaacatagacacagcctttcgcataacactgacacacagaagtgggtgttcacccacagcatgtcactcagggtagcaatgacaaacgcagatccctaaagcccatcagtcaggcacacacagactccgactccatcgttcacaatacctgggacacacacagacatccatgtgtcctcccaaccaagttcacacctgcacactcacagtcacccacagtcacccccaccacacacacacacatacacacacacacagacggtacaaggcctgcagaaacacatctgacagcaggtcacacataatcttttttatttttatttacttatttattttgagatggagtctctcttggctgcccaggttggaatgccgtggcacgatctcccggattcaagcaattctcttgcctcagcctcctgagtagctgggattacaggcgcgtgccaccacaccaggctaatttttgtatttttagtagagatggggtttcaccatgttggccaggctggtcttgaactcctgacctcaggggatccgctggcttcagcctcccaaagtgctgggattacaggtgtgaaccgccgcacccggccacagtttcctttttatttttttgagacagggtctcactctgctgcctaggctggagtgcagtggcacgatctaggctcactgcaatctaggctcactgcaatctaggcccatctcctgggctcaagcaatcctcccacctcagcttcccgagtagctgggagaacaggtgcgcaccaccacacctgggtaatttttgtattttttgtagagatggagttttgccggttgcccaggctcgtctcaaactcgttgagctctagctatccacccacctcggcttcccagagcgccgagccaccatgcctggcccaaatttttgtttgtttgttttgttttttgagacagggtctggctctgtcacccagactggagttcagtggcacgatcatagctcacagcagcctcaaactctcagactcaaatgatcctcccacattagcctcccgagtagcaggtctcagtaatcttgatatacacacacatacagaccacccccgcccaagaacacaactgcacacatggacacacagttgttcacagtaaaatggatcctcttagccacccacaaagacactgtcacccacaaagatatatgagcacgaacccagtggccatatgcccatcgtcacctaccctgagacttgtttaggcactcagacacctgcacatctacaataatactgacatacacacagacacagtaacacatgcatacacactggcatgcatagactcacggggaaatgacacacaggcaggcagaaatcctgtcatctggatgcccacaaacccaataatatttttttttttttggagacagagtcttgctctgtcacccaggctggagtgctctgtcacccaggctggagtgcagtgacacaatctcagctcactgcaatctccaactcccaggttcaagcgattctcctgcctcagcctctcgagtagctgggattacaggcgcccgctaccatgcctggctaatttttgtatttttaatagagacagagtttcacaatgttgtccaggctagtcttgaactcctgatctcaggtgatccacccacctcggtctcccaaagtgccgagattacaggtgtgagccagtgcgtccggccccaatactcatttattgagcatctgttatgtacccagcactgttctagcactggggatgcagctgtgaacaagagggaaatctgaacgagcacagtggttcacgcctgtaatctcagcactttgggaggccgaggtggcaggatcacttgagatgaggagtttaaaaaacatattagctgggcgtggtggtgtgcgcctatagtctcaggtactagggaggctgaggcgggaggatcgctttgagcccaggagtttgagattgcagtgagctatgatggcaccactgcactctagcctgggtgacagcgagacctagtctcttttaaaaaaaaaaaaaagaatgaaatccctgtcttcccacacctgacattttagtggggaatgggatgggggggacaccatgactggatgatacagactccagtcactcatagtgacaccagcagacaccagacacccacgcacactggctcacatgtcgacctggaattacacacaattagcctgatatacacccacagcaatgctgacatccacacacaaacagaagcccacaggaacttacacacacacgcacacacacagctggtggagagacagccacctgctatagcacactcccacctggacttacagacacccacagaaccccccaaaatacctcagcaaagtagcttggacctgaagcccctatttatagacccatagaaacatcctacaagagttcttgagacggagcccaccctgaccccaaacccagggtcacccagcaccataagcctcagtagaagtgtctgaatttcccttattaaaaaatttttttaatttgttttttgtagagatgaggtctcactgcgttgcccaggctgatcttgaactcctgggctcaagtgatcctcctgcctcggcctcccaaagcgttgggactacgggcatgagccaccgtgcccggcctgaattctccttcagcttggcccctccatagcccccaatcccattcctggagaagccagaaccttctcgccttccccagccctggcctcacatctggcaggcctgggaaggaagctgggctcctagcccacccaccgcccacgggctgggtgggacagaggagccccttgtctgaggacccctggcatgaaagactcccgcagctggaaaggaagtgggggaggtggcctgcggagggtggggtgggaacctcagagcccacgcaggtatcactgaaacgagacacccctgcttgccagtctagacagcctgggccatcaccgtgaccccacggagacccccacagggctcttggtgtcgctggaacccccataatgggctctttgtctgccaggtcctgacgacctcccccaccccgtgtcccccttccaggcccaagtacacacacacacacacgcacgcacacacacacacacacgcacacacatacagttacatacaacacacagacacacaggagcatatatataggtactcatgcgtgaacatacagagacacccccaacccccatgcaccaaggctcagggttgagatcgagaggagacagcttgccacctcccaccctgagggacttcacagtcaagacttcaagaatcacgggcaggacacacgggccgccagacacccctgggagcttggagacctggccttctagccatgcccaccttgttcttcaactatttttttttttttgagacagggtctcactcctgtagcctgggctggagtgcagtggcgtgactgcgtctcactcactgcagcctcgacttccctggcttccgtcagcctcgacttccctggcttgcgtgatcctcccacctcagcctcccaaatagctgggactacaggcgcacaccaccacacccggctaagtttttctatttttagttgagccagggtttcaccatgttgctcaggctggtcttgaactcctgtgctcagtcagtcttcctgctttggcctcccaaagcagtgggatgacgggcatgagccacccggcgcccagccttgttcttcagcttgacggtagagctgcctccatccatccatccatccatcacttgctcacctgcctctgctaggacttctcacctccgactctgatcccccgacttgtgccagctgccctgcaccttcctggtgctatgtgtgggggggtgggggcaaggccctgggatagcgtggctttttttttttttttttttttttttgagacggagtctcactctgtcactcaggctggagtgcagtggctcaatctcggctcactgcaatctctgcctcccaggttcaagcaattctcgtgcctcagcctcccaagtagctgggactacaggtgtgcgccaccatgcctggctactttttttttgtttgtttgtatttttagtagagatggggtttcaccatgttggttaggctggtctcgaactcctgacctcaactgatctgcccgcctcggcctcccaaagtgctgggattacaggaatgagccaccgtgcccggctcataacgtggcttttagagggccgtcccccacaccccacttatccccagctcccctgcccagaaagaccctcccagctgcactggggtcaggtgaggggtcccaggaactaaggataaagaagaagcaaaatgaaggccctgaaagacacccctaccccccatgcactgaggctcagggtcacaagcaggaggagacagcttgtcacctcccactctgagggacttcaaagtcaaaccagcagacagctgcaaccagacaagcagggcagggctgcagactccctcaggggacaggaggggacaggtatcacggtcaccagtcacagacaggagatggagatggggggtaaacagctagacacatacaggcagatccagacagtttgaggcaggtgcacgggctgggcaggagacccagatggagaacagatgtgtgaggggcatagtccgacccagacagacgaccctgggatgaccaagagacaggtggacccagatggacactgagggccagaagcctgcacggaccacaggcaaagaagagagatagtcagacccaggattggggctgccggcctcctgtcgccccagccccagcttcctggccttcaagaccagacccctcttccactgtggtcttgtgtcttgtcttagggagaaaccttacagggaacaacctccttggcagttcaaggccaaagccctcagagggaggagtgggaggcagaaaggacacacaggaggtgtctggggaaccccctccaacatagccagaatgtctcctgcctgatgaccccccgcccccaacattaaagctgttcacagtcatcaagaagaaagattcctgtgggacgaggtggctcatgcctgtaatcccagaactttgggaggcccaggagttcgcgaccagcctgggcaacatagtgagatctcatctctacaaaacttttttttatttgtttgtttttgttttaagttagccaggccaggcacctgtgatcccagctacttgggaagctaaggtgggaggattggttggggctgggaggtcgaggctgcagtgagctgtgattgcgccactgcactccagcctgggcaacagagcgagaccccgtctcaaaacaaaacaaaacaaaacaacaacagcaacaaaaaagagaataaagatttttcttttttaaagaaacggggttttaaagaaccactgctgggtgccgtggttcatgcctgtaatcccagcactttgggaggcccaggagttggagaccaacctggccaacatagtgaaaccctgtctctactcaaaatacaaaaattagctggccatagtggcaggtgcctgtagtcccagctactcaggaggctgaggcaggagaactgcttgaacccaggaggtggaaattgcagtgggcagagatcgcgccactgcactccagcctgggtgacagagcaagactccatctcaaaaaaaaaaaaaaaaagagagagagagagagatgggggtctcactgtgttttccaggctagtctcaacttctgggctccagccatcctcctgcctcccaactagctgggactacagacaagaaccaagcttttgaggaatcttgagagttctggactaacagagccacttaccttcccagtccacaaaatgggtatatcctgctcacagcgtgatgaatgtagcgttatcatcagtaatgtaattattaacacctgtgctcccaactcactctccttcccaagtcctaggcgttctcctccttagaatgatgatccacaaggcaggggaccggccacctccctcggaagggcctggacacctggggtggaggtggcggataaagagaagccgatcaggcccccccactccacagcctgaatgggaggatctgctggacgtggcggatgagctgcgagagagggcgccccactccagctccagacagaggggtgggaacgtgaccccgacccggggcgggtgagagggcgggctctggggaaagggctctagaaggtgccgggaggcgggaggggggcttcgggagggcgagttagccgggatcgggcttgaggggccctacgaaattcggtttgggggcgtgcccggtcggggcggaccttagtggggggttgggcttcgtgggggcaggacgcagtcccggggcgtctatagagcaggcttttgtggagggctctaagggggcgggccctaagggagctgggctctttgaggactggcttaggggtttggcggtgggctccgtgggagtctatatgggcgggttttagagggagtgtgttctggggaacaggtcaaaagcgacggggctctaaggggcagggcctgggctggggccttggctggtggctccagactgtgggtggggctctcgggggcggggctctcgggggcgcgtcctcgggggctcggccgggttccgttgccaccaccgtgaggggtgtggtgggggggtggttcacgcagctcggcacacttgggggtccctcatctaccttggggttatgccaggcggttattttgggcctcagtattcccctcggtgaaatgccaggggccaggaaattacttatttttttgcgacgacggggtctcgtcctgtgacccaggctggaatacagtggcgcgatcacggctcactgcagcctcgagcctcgaactcttggggtccaagcgatcctcccatctcagcctcctaagtagctaagactacaggctcactacaccacacccagctaatttttttgtagggacaggtatctcgctatgttgctcaggttggtctccatctcctgggctcaaaagatcctcccgcctcagcctcccaaaatactgaattacaggcctgagccgcagcacccggccatgccgggtgcaccttcctaggccgtccgcagacccaggtcaggggcgaaggcgcgctcgcccatccctggtcgtcactgcttggcttgcggggggtgggagataggggtgcgtacctgtaggcctgggggcacccggggcgggggggtggtcgccgaactctgtgcgatcactggaggaagggactgggggtcatttgagggatgaggaaatggagagggggcgccgcagccggttttgaggcccaaggggcagcccccacgtggctgcgcggactccctccggaagtgcccgagttcagatgctgtgtgaccgcgcacgcggggcgagcggcgccctctctgaacctcctgcctctcccctgtctagtggggccccagtgcacttgtaaagtggagagacctgacgaccccccacccccaagcgctccactcacgctgttgtgattcctaaaccatcgtgcccggaactcagtgaagctcccagaacgtattacattgtattaaaatggcttgtttatctccacgttgcatcaatgccctcggggccaggatcctccgttgccagacttcccgggaacacttggaatgcctcctccacctcggactagcagtggcctttggcctcagtctccccagttgacaaaggggggtaatctgcacctccaggatcactttgtgaattacttaaggagcgggcttgaggccagcactcccctgcactgctacatctccatccccatagcaaaggctacattttatttactagcatttatatttgccttgtgtttttcccagatctaggtgcaaacagcacctgaaaagcgtttgtttatttcatgagagaaaaggggttccttactctctcctcctctccctcttcatgctctctggttccctgccacctaccccacccccgactccaggtcccggaaaatttgccaagggtttgggggaacattcaacctgtcggtgagtttgggcagctcaggcaaaccatcgaccgttgagtggaccctgaggcctggaattgccatcctcctgccggtgactctgaccttccagatctaggggggcctggggagcccccaatccagcctgggcacgtcccctcccctaggccacagccgaggtcacaatcaacattcattgttgtcggtgggttgtgaggactgaggccagacccaccgggggatgaatgtcactgtggctgggccagacacggcttaaggggaatggggactggggacaggaccccccaccgccacagtcactcagcctgttttttgccctgaccccaaccactcctctttggagaggagagctggtgtctggaatctggatgggctctggctggatttgggactaaatattagagggttgggggtaaacaggctggggcagggcagctaaaatccccttttttttttttttttaagacagagtctcactctgttgcctaggctggagtgcagtggcccaatctcagctcactgcaacctctgcctccagggtttgagtgattctctggcctcagcctcccaagtagctgggattacaggcatctgccaccacagtgggctaatttttgtatttttagtagagacgagatttcactgtgttggccaggctggtctcaaactcctgacctcaagtaatcctcccccctcggcctcccaaagtgctgggattacaggcatgagccactttgcctggcctaaaacccctttctgaaatgtgggtggtaagttctgctccgtggagtgctccatagttttgttttttaaattagagacaggatctcgctcttgtcacccaggctggagtgcaatggtgtgaccttagctcactgcagcctctaataactggagtcaagcgttgatcctcccgcctcagcctccccagtagccggaaccacgggcacgcaccaccacacctagcttatttcgaaaaagtgtttttgtaggaacagggtctcaaaacgttgcccaggctggtctccaactcctaggttcaagcaatcctcctcggcctctcaaaatgagccacagtgcctggccaataaaagtttcttaaatgaatggatgggtggatgagctgtgtaagcggcacagcgtctctcctctgtgtccaagtcctgagcacaccctcccctcctgggactgagctgagatctcatctcggggaggacactgaagacctgtaggtactaggggtcccctcctaacagcccaacttgctatcccccacctcccaactccagagggttctttctcacccctctgcagcccccgccaggaaagggctccctccccagcacctagcctcagggggccccagtaactagaagaaggaggcagatgtggtgctttttgttgttgttgttttgagacagagtcttactctgtttcccaggctggagtgcagtggcttgatcttggctcaccgcaacctctgcctcctgggttcaagcaattcttctgcctcagcctcctgagtagctgggatcacaggcacccgccaccatgcccagctaattttgtgtgtgtgtgtgtgtgtgtgtgtatttttagtagagacagggtttcaccatgttagccaggctggtctcgaactcttgacctcaggtgatccgcctgtcttggcctcccaaactgttgggatgacaggcatgagccaccactccctggcctggtgcatgtctttataaataactggatgggcaggtggcttcacacctcagtttgctcatccattcaatgggggttccactaagacaaccgatgtgaaaactcttggagggagaccagagctgggggccggggggcatgatccttcccccctacccccgcaaccagcccatgagcctgggactaccacactcctttcagagacagctggagcatcagcaacctcccgcctggacacacacacacacaaagaacccaggggcacctggccactcccccgcccaggggaaggaagaaaaagttataaagaagttactaagttaacttctttaagttactggtaactgctagtctttgggggtggggtttccaacccattctccccatcctccagtggggctggagggctaaggactcctacaaggaggggaggcagggtagccccccaattccctggaggtgtgtacggggggctgtggtgcacctcgcaggatgcccccccacacaccctgtgtcctgtagtcccccggcacagccagaggccatacagccctttaggaggagtattagtggggcaccaggcccccctgtgacaataaggaacctcccacagcctgctcctccctcttcacacccccttggaggtaaaaggagggtcggccagcacagactcccaggctccagagaggggaaggaaggggcagcagagaggggtcagaaggagggagcttaagccaggcagggttacttgtctctgtgactccttccgcctggcacatgctgcccagctatggggacctttgacctgtggacagattacctgggtttggcacacctggttagggctctgagtgggaaagagggtcctgaaaccaggctgagcccccagccagagccagagccaatgctggagccggtgtcagccctggagccgatgccagcgccggagtcggtgccagtgccgggacccaaggatcagaagcgcagcctggagtcctcgccagctcccgaacgcctgtgctctttctgcaaacacaacggcgagtcccgggccatctaccagtcccacgtgctgaaggacgaggctggcagggtgctgtgtcccatcctgcgggactacgtgtgtccccagtgcggcgccacacgtgagcgcgcccacacccgacgcttctgcccacttactggccagggctacacctccgtctacagccacaccacccgaaactcggcaggcaagaagctggtccggcctgacaaggcgaagacacaggacacaggccaccgccgaggaggaggaggaggagcaggtgcctgcacaggtggctgggggggacctgtccgagggtagtggctgagcccccctgtgaagtaagattagccccagtacccacctccaagggttaggggaagaccttagagagagcttagaacagcagttgattttatttacgtatttatttatttatcttgagacaggtctctttctgttgctcaggctggagtgcagtggcgccatctcggctcactgcaacctccacctcctggattcaagcgattctcctgccccagcttcctgggtagctgggattataggcgcgcgccaccacacccggctaattgccaccatgcccggctaaattttgtatttttagtagagatggggtttcaccatgttggccaggctggtctcaaaactcctgatctcgtgatccgcccacctcggcctcccaaactgctgagattacaggcgtgagcaccgcaccgagccagtttgtttatgtatttatttatttatcttgagacagagtctctttctgtcacccaggctggagtgcagtggcatgatcttggctcactgcaacctctgccttccgggttcaagcgattcttctgcctcagcctcctgagaagctgagattacaggcgcctgccaccatggccagctaatttttgtatttttagtagagatggggtttcaccatgttggccaggctggtctcgaactcccaacctcgtgatccaccctcctcagcctcccaaagtgctgggattacaggcatcagccaccacatctggcccgcagggttattatagatgcagaaagaagacttttattttatttatttatcaatttatttttcttcctttttttttttaatttttttttttgagatagagtctcgctctatccacccaggctggatggagttcagtggtgcgatcttggctcactgcaacctctgcctcctgggttcaagcgattctcctgcctcagcctcccgagtagctggaattacaggcgtgcaccaccattcctggtgtgttttttttttcctcccatagaaacagggtcttactatgtttcccaggccggtctcaaacacggcttaggtgatcctcctgcctaggcatcccaaaatgctaggattataggcgtgagccaccacgcctggccccagtgaggttttctttctttctttcttttatttgattatttttctgagatggagtcttgctctgtcacccaggctagagtgcagtggcgcgatcttggctcactgcaacctgtctcccgggttcaagcgattctcttacctcagcctcccgagtagctgggattacaggcacccaccaccacgcacggctaatttttgtatttttagtacagacgggatttcaccatcttggccaggctgagtcttgaactcctgacctcgagatccacccgccttagcctcccgaagtgctgatattacaggcttgagccaccatgcctggcccccagtgaggttttaaaagagaaactcgttctagcaacttaaattgcctttgaggaagtcagctaacagaggaggggccagtctaactaggtgtgtttgggcactgcctcccccagcagactgtgagctcctggaggatagtgactgggagaggacgacccctcccaactactctcaggcagctttgcagtgaacatttcttaaagtcatgaaagggtcaggtgtgatggcttacacctgtaatcccaatactttgggaggccaaggcaggaggatcgcttgagcccaagagtttgagaccagccagggcaacatggtgaaacccagtgtctacaaaaaattagctgggcatggtagtgtgtgcctgtagtcccagctacttgggaggctgacgagggaggatcgcttgggtccaggggacagaggctgcagtgagctgagatggtgccactgcactgcagcctgggcaacacagcaagacctcgtcttaaaaaaaaaaaaaagcactggtcatggtggctcatgcctgtaatcccagtacttggggaagctgaggcaggtggatcacctgaggtcaggaattcaagaccagcctggccaacatggtgaaaccccgtctctactgaaaatacaaaaaattaactgggcatggtggcatgcgcctgtaatccctgctactcggggggctgagacaggagaatcgctagaacccgggaggtggaggtcgcagtgagctgaggtcacgtcactgcactccagcctgggcgacagagtgagactccgtctcacaaaaaaaagaaagcatgaaagactgcctccaggagaagatagtgtttcctgtgaggtttgatgctgtctcactgggagacgctggaggccaaaaggacatagggaagatggtgtcctgcggccagcctttctgatgaacaacttttgggagtaacagatccggggaccccagagcacggcggccacgagagggcaccacagtcgcagaatcggaactcctgtgctttgtctcgggctctgggtcccagcggggccgcccggcggagccagagacgtcacggggtcgctgtctccggagcagcccctgggtggcgccagaggtccagcaggcccggaggccgagtccgtgggcaacttggggagcgttgagtcatcgcctgtgattaagcatttctctccctccccctccactaggtttcagaggtgccgggaagtctgagccttcgccctcctgctctccctccatgtccacctaggaggctgcctacacctgggcaagggcacccgggctcggctggatttccaggaagacccaccctatgacgactgcccccactcccagaccctccccccagcctgggattgagccctggggatgacccggggttggcaagggaagagctgaaatcgccctgtccttggggaccccaccctttgtgccatctgccgtttccctagtgctgggcatccagtcagccctcaataaatgcttatgaatggatcaacaacagacaagccctggtcttgggacaaggtgtagtgtgaaccttgctgggagtcctgtacctagatctccccttctccttctttgagtttcggcaccctggggtgctggggtgagctgctttgtgcagagaaacacaagtgggtgccttggggtagctgggggggttcatggcacctcaaagccagatcgacatcatgagaccctttctgtggacatttggtctttcagccaccccctgcactgacatgcaagatgggtggactcctcccatcccacccccagctccgtactggaggtgggggcttcatttgaggaagaaattgacacacaactagacagagcccccccccccgacatcctcatcactaaggaaggtgaatgtttatgtcaccatggatgccccagtgacaagccaggcagtttagagcaagggagggacatttagggggcagggaatgggaccatgtcctgggtgggcttgggcaggagcagaaggatggggctgttctggcagggcgggggggaaatgcatgtgggggaatccccacacccctgcctgcctcctccacctccagatcttgtcctgttggggcaacaggtggcagtgctcaggaagccagtgcgcccactgtgcagtccacattcctaccccgcccccgtcccacaaaccagccctgaggcctgtggtctggcagcggggagcaggaatcgagctctttgctgtcccctctgcccttggctttccgacttaaaagacttaaattggaaccggaggccctggggatgggggtgggctcttgcagacagctgggtcgtggagggggaagtggggaggaggagaaagaaaacagaaggatcccagcggctcccagggtctgggaatggagttacagtttcctagggcagagccgctggggctggagacccggggaactgggcttacaccagggcatgtcctggtggacagggggctcacctgggtgtgaacccaccctgctctttcctcccctcctgcatcaggtctccagggtgtaaggctgcagggtgggaggaggaccccgcctgagccatgggagctggggtgcaggagtcacagagtgcttcatgatgtcgaaggtccagtcagcctttcagtgacagatttcacagaggcattgttttctgtaaactggggatgacagcagcccctgtggttgctaacaggactgtcatctggctcgagaggcttgcgtgggatgagaaatgccacgacttcagccatgtttgcatccataacctcctgggatggcctccttcctgtctggggcccacaggcagcttgtcctggaggatgggccaagccaccggagcgcaggactcaccctgcagctggatgatcgcccagggcgtctcttaggcttcgacccgcgtgtatgctcaagagcctgcacacagatgtgggcacacagtcacccacccctggagattcgccccccccttgctttcccagggaagctgaggcataaaactcgtagagggcgaggaggaggaagtgggtagagaggtttgtgggcggaaggtgaaggaactgaagcctcagccccaaacagcaggtcacggggcctctacagaatcatttattatgggtcttcccagaagaaataaaatggaaatggggagaaagaaaacaaagggagctctcttctcctccaggaaagaaacaaattctgaaccatccatacttggctcaggaccctaaaatttgcaaatccggacaggatgggccctgctcagaggtggccagcttcctggagcccaggcccgcttgaagtcactggggctgtgggagacacagtttccctccctgaagccaagggtggcaaatgaccttgaccctggccaggtgaggccaggacctcacggcctcctttgtgttgtccatggaagaccaacttccgggcaactgaagggaggtttgtagggtccactaggaccccctggagcatcttggaggaggtctgcggacatgggggctgggtggcaaaggaaacacagacctcaaagtggcctacaactccctccagggtgggtcccctcgagggatattcccaggccccttggaagggtaaggcaggggggctttgcctcccagctttgtcttccggtagttaaggcgcttgaaagcttccaggtcccggtgggtgcccatgatcagccggctgtgggggaaacacaggcatgcgtgtggggctcagtggtcaccaggtgacagagggggccgcgcctcacagccacatggtcaccaatgactcaggtgcacacacacggctcacacacgtgcacataaccagaaagggcctgttgtagcacaggctgggcctgttgcagcctttcttcagagcctgtgttctgcaaaggacgggggaggggggccacggtgaggacccagcagcagtgaggtgcctgaccctcgctgcccacctaggggcttcacacttcagtccctccctgctcctctgagtccccactggcctcccgcagaccctgtgccgtgagtccaagcccaccccgtacttcaggttggagagctcaacgatgaggccacgcacgacgttggtggcatcctccatcctggaggcctcagaggcctggatccccacgaaggtcctggccagcagggaaggaaattgagagtggcccgacctcactggactaccagagctctccagtgggaggggcttccgcagggcctcgcgccatcttttccaggtgtccagcctgtcctcctctgttcacgacagaaccctgatggccaacccagctggctccactgcccagcaggcccagaacccaaccgcttctcccctacctgccctgccctctcaggacgctgctgccaccgcctccctatctcctgcccctgtggcttgtcccccacaggcactgggggctgtgaacttggaaacctagctcagaggcaagccctctcctcccgcagctgtgcaccacctgcctgccccgtgccctcccctcatcccccgcttctcccctcccctcggctctagccacactagactcctggccattccttgagcacctctcaggattctggaatgttctttcccaaatgtctcctcctggtggtggcttccctgattcctccttacattttaaccccttctccgctgcctttttttccccaacactctgccatctgactatctaatctgctgtctctcatgtccccacaccccgaatcccccagtagcattcaactctgtgttttgtcccacactgcctccccagcacccagggcagtgctagaaaggccagcccagatggcattcatatccttggaaggtttgggaggtcaaggtgggaggatggcttgaacccaggaattcaagaccagcctcggcaatgtagtgagacccccatctctacaaataatacaaaattagccaggcatagtggtgcgcgcctgtagtcccagctactcaggaggatgaagtgggaggatcagttgagcctgggagatggaggctacagtaagctatgatcctgtacaccagcctgggcaacagagcaagactctatctaaaaaatatcccgccaggcacgatggctcatgcctgtaatcccaccactttgtgaggctgaggcaggtggattacttgaatccaggagtttgagaccagcctgggcaacacggcaaaatcccatctctaaaaaaaaatatacaaaattagccgggtgtggtggcgggtacctgtaatcccagctacttagggggctgaagtgggagaatcatgcgagcctgggagatcgaggctgcagtgagctgaggttgcaccactgcactccagcctgggtgatgggagtaagactgtgtctcaaaaaaaaaaaaaaaatcacggaagagccaaggagccacagaacacctcccccaccccacagaacaggtgccactctcagacacaggcagtacaggtggccaggcgggtaagtgggggccacccgccctaaacccgcccatgccccaggcttcgcagcacctccggggctgtcactatggaaactgctgtcctgctgctcctgccttggtcaccctgaggtgtctggcagcccctgggtcttagcctcttgtgtgtgtcattcagcctcaagccaccaaaccagacccggggccctctgggagcttccagacatccaggacggtggggaggggagctgcattggccctgggacgctgtcggagattcagatgtgaaccctcccggctcttcactcaaaccacagcgggccgctctgatgaactgcctctggtccacgtgcaggttgtgtgtgtggctaagggaggtggccagtggcacagcaggtacaagtcacagggagtgacggcaggaggcagggacagagccgccctctgctaggggaggagaaggaggaggagggtgtgggggccacacacagccaagggctgagtcccaaaccctcctccacccctgccagacagaaacagaaacttggccataaataattgataagctgccgcctctgcagagaggcaggttcaagtgccaggtaacagagagggcagccacccagcgctggcttcgaggagggctgtgggagggcacgggaggaggggacaggctgcggagaccccgggcatggtgcgggggagagggtgccctcctcacacacagcaggctggaggacggctcactggtggcctgtgggagggaggaggtggttcgcctagggcaagagccaagtggggaggggaggaggtgagggcaggttagactcactcgggtgcccgcctggtgccagagctaggaacagctccaagatggtctcagccaacagttctgagccctgtctgggtcccctccccttcccagggactcaggaggaagctttggcccctcttcccagagagaaagagcccacagagccggaggcactgtcccagggctcctggggagcttctgggtggggagatgctgggttgggtgtcgatcactggtcactgtcgcccattctctgctttcggggagcaggggaatgtatacagtttgaaagacagggctcagctcccctgctggactgaggaagtcgaggcccagggagggagaactggggtctgtctcctccatctgtcaccctccttggtaaaatttgtgagggtcctggagccacttctcacccacgccacacctacctcggctgggccttggccactgcaacagggtctccattggcatgtgagctggggcccggccagcaagggcccggcttgttccccgaaggaaagagctggaaagagagcacaaggtgtgagtggtcgaggcctgggtcgggcaagctctgcacaggggaaccagaagtcacgctgatgcttttggcttcaccgcggccacagcaggtcacatcggggctggctgggactcctgcagaggaagagcggtaacggggaggaaatccacgatgggtagacccgaggctaccagcctgggctgcgcccgtcctttccccttggaaagagaaaggccacagccaaccctggtgtccgctcctaggcccgggcctcccacaggctgatctgggcagtgggggcaccactgtgccatgatctctggccctgacaccactgcagtctcctgcatgcccctcactgtctttacgggtacagagaaaacacaaagcgggggcaactgcggtgaagtggagtcgtctaccttggctgaatgtgccacagacatcctgttaggaaaggagtttgcaaatataacacgaggggaaaactcccagtgaatacaggggaaagcctggtaactccacggcgcttaagcttctaagcgtcaatggtggtttaatttccatggaaaatgttaagctccgttacagtggtgacctatgatgtccctcagaaaagaggcaatgagccaggctggggacacctgtaatcccagcactttggaaggctgaggtgggaggattgtttgaggccaagagttccagaccagcctgggcaacacggcgagaccctgtctgtacaaaaaaaaaaaaaaaaaattagctgggcatggtggcacgcacctgtggtcctagctacttgggaggctgaggcaggaggatcaactgcttgagcccgggaggttgaggctgcagtgagctgtgattgtgccactgcactccagcctgggcgacagagcaaggccctgtctctaaaatttaaattaaatgactccatatgcagattgcagaagctccatcagtccaagagtgagtgcaaaggatctatgagaaagtaacaccaaaccctcccatgacgagaccttggtttgaggtttgaaagctctgtctctgctgtgtcacctctgagtcccctcctctagcacagtgtgtggccacagtgaggtcaggaggaggtgctgagacggcccgctcgatccatctttgctgttccccgtgcccctgcccatgttgggagacacgggcctcggccttcctgccgggagccacccggaaccttcccacgggaatgtgttccttgcctgggtcgcctcaacttgctggggaacgcctcgtgtcaaagccaaacacgcccaggccctggcagtgctgtcagggcggtgcctcctcccctggctggggaaaggctgctaatgctggtcgggtttgaccagcctggctgtctgtctggatccccccaagtctggatttcagggtctttttccaagcttgcagtttggcagcccgtttaggagggctaggggcttcacctgctggatgccacctaggcacacctggccccaaacaccttaaccatttcccagccttctctccaagccaccactcacgagaccacagactggaggcaatggaggcggctcttctctcaagcgagggatttgcattttgcaaggcatgaagctctcataaaatttcagctgtgcccagcaccagaactcctgcctttcccacatgctcgtgttcagcctctaccactgaaccacactgtgactcactttttttttttttttgagacagggagttcagcacccaggctggagtgcagtggtgtaatctcggctcactgcaacctcaaactcctgggctcaagtgattctcctgcctcagcctcccaagtagctgggactgcagccatgcatccccatgcctggctaattttttcttttcttgagagagtcttgctctcttgcccaggctggagtgcagtggcgcgatcttggctcactgcaacctcagtctcccaggttcaagtgattcttctgcctcagcctccggagtagctgggattagaggcacacgccaccatgcccagctaatttttgtattttggtagagatggggcttcaccatgttggccaggctggtcctgctctcctgcctcggtctcccaaagtcctgagattacaggtgggagccactgtgcctggccatgaatttttttttttttttttaacatctcaacacagggacagccaaagaaacagaggctgacatttgaaaagcaaattggactctgcgttccaggacgcggcggctggggcatgacctgggtgccagcctggcctcctcccctcccacctgcctcacctctagcaggcgcacgaactcctccagagtcttcactgccacacccagtgtgtggacagagaactgcctacctccctgggcgtgactgtgatgccctcagcccaggctcaggtgtgccaacggctagggaggtcgctctttccctggggggcagggctgaagcaaggctgccatctgcccagacaggagaatgaacgccaacggctggcaccggctctggagccagaggaggccacatccgggcagccggtggggcgggcagatccctgaaggaggcaaagcccttacacgttctggcagaaaaacaaaatgacttatgtatgtttggaaaagaatcatatcaggacccccagaggaccctaaggagatgggcaaaggctcttttgcagcttgggagtgaagccccctccccaggcccaggtataaagccatccccaggcccagcttctctccatctgtgtctacccgcctcaatacatcccctgggaccccacggccagggtcaggcactgaagcagaagctgccaggggctggcactcctggggactccagttcaatgtggggggcccggctgagaaagcagctgtgtgtcaccatccctagatatgtcgacaaccaccaaaaggcaggtctacactttctggaaaaccaccgactccacacccagtagagctgcaactcggactcctatagtcgttggctgtgtaaatggtaagccctgagccccagctccccctctgccactgcaccgagtgaggagggggcttgtggaggttgggtgcctgccctgggcaggtatgtctgtcactcagggcagctctcacctgctcaggtggggcttcgaagtcagaggcgtccagggcatcctgtatctggctgtccagcaggaagtcgagttccacagctaaagagtctgcccaggtgccctggtctgcagaatgaggcaggtggtctcgctgccctgccagctctgaggtggtgtctggaatgccctgctgagccccgggctcctggagagggtcgtctgctatttctctgtgttccagcacaacagaggcttgcggggacacacggaacccctcgaggtctcgttcgaggttctggccacctaactcggcttcctcttgagcaggacctggctcctgcttctgattgacacatggacctgtgtccggggatgcatgaccggaatctccagcacccatcatggactctccgctcccaggtgccagagccagggaggctgtagggcccactaggacatcgccggggggcttgccatcctgccctgcctccccactttctcctgtggtttccccagtgagcgaggtgcagcctggcaaggccctcctgtggcctccatcagcggccttcctcctgggagaggcaggtgatatggcactggcctgcccatcgggcccagccacctccagagccctctcttccagctcagtggggtctgtgctcaggtctgcgatgacaaccatcccgagggaggagcatcccaggctgctatgagtcccttccccttccctacccatcctgctgggggtctgctgggggtcaggggagccctgggccacagacccgggttccaggcaccaagaggcagggcccagtcctggagcagggcctgaggtaggagctgatgctggggtacaggggacaccgtctccctcctcctggggccctccaggcaggccagcccctgctgtcctttgggcccctccctcctggggggctcctctgtctggcttctccccttcagaatcaatgcttggtaggtgttccttttggccaccgtcacctggaaccctgtctgtctcaggcttgctgtcatcggccccttgttctgacaggtggtcttggctggccctctgtgaggcggacaaccccgtccccctgtctggagggtcatcaggctgagaatccccactgccgggcaccgcctgcacagggctctggctgctctgctcagggcgggcactgtctgcctgcgttgggtcccccagctccgtggcctcctggagggggacccccagggtctccactagcagctggcatcctggactctgggcgctggactctgcgattgtttcctgtggacagaaaaagactcagccccggggcctttgataaccaagttctccgaagagttttctattaggttggtgtaaaagtaattgcgggttttgtcattacttttaatggcaaaaattggccaggcgtgatggctcatgcctgtaatcccagcactttgggaggccgaggtgggcggatcacttgaggtcaggagttcaagatcagcctggccaaaatggtgaaaccccatctctactcaacaaatacaaaaattagccaggcatggtggcagttgactgtagtcccaactactcaggaggctgaggcaggagaattgtttgaacccgggaggcggaggttgcagtgagccgagataggactgcactccagcctggacgacagagtaagactctgtctcatacacacaaaaaaattagtggcaaaaactgcacttacttttgcaccaatctaatagttgtcaccaccctgttcaaagactcagatattggcaccggccatcatgcatggaaataggcatcagtaccagggccggcgactggagggggatctggaagcacagaaacctctccttccaccaagctcttctctccaccagcaccaggtactcaatcagatcagggatatgaaaatcaaggtggcattcagaccacaccaatgtcaatttcctgtttattattattattattattattattattattagacagagtttcactcttgttgcccaggctggagtgcaatggtgcgatcttggctcactgcaacccccacctcccgggttcacgcaattctcctgcctcagcctcccgagtagctgggattacaggctcgcgccaccatgcccggctaattttgtatacttagtagagacagagtttctccatgttgaccaggctggtctcaaactacagacctcaggtgatctgcccatctcggcctcccaaagtgctgggattaaaggcatgagccactgcgcccagcggctattattatttttattatttatttttcataattttgagacagggtctcactctttcgtccaggctggagtgcagtggtgtgatcacggctcactgtagttttgaccttcctagattcagacgaccctcccacctcagcctcctaagtagctgggactacaggtacacaccacaactggctaaattttgtggtttttttggtagagatggcgttgtgccatgttgcccaggctggtcttgaatgcctgggctcaagtgatcctcctgcctcggcctcccaaagtgctgggattacaggtgggagccactgcacctggccaagttttaaaacaattattgtagcctggacgcagtggctcatgcctgtaatcccagcactttgagaggccgaggcaggcggatcatttgaagttgggagttcgagaccagcctggccaacagggtgaaacccctattctaataaaaatacaaaaataagccaggtgtggtggtgtgcacctgtagtcccagctactggggaggctgaggcaggaaaatcacttgaacccaggaggtggaggctgcagtgagccgagatcacaccactgcactccaacctgggcgataagcaagactccatctcaaaaaaaaaaaaaaattattgtagagacagagtcttgccatgttgcccaggctggtcaagggaagtctcccaaagtgttgggatcataggcatgagccactgcacctggccaattgcctagttttggtgatggactatagttatgcatggtgttaccactcggtgaagctaaaacagagaacaccggaaattcactctgtaccattttgtgtttttttaaaaattgtgctaaggccgtgcgcagtggctcatgcctgtaatcccagcactttgggtggctgaggcgggcagatcacctgaggtcaggagttcaagaccaggctggccaacatggtaaaaccccgtctctactaaaaatacaaaaattagctgggcgcggtgggcaggcgtctgttatcccagctacttgggaggctgaggcgggagaattgcttgaacccagtggggcagaggttgcagtgtgccaagatggcaccatcgcactccagcctgggtgacaagagtgaaactctgtctcaaaaaaaagaaaaaaaataaaataaagaattgttgcatagtcaacacacatccatagcgcaatgtactgaaaacggtgggtggagaggtgcaggcctcaccattgccaaagaactccagggttaaatggggctgccgaggctgggccaggaggctgcacctgcgctgggctcagcctggctgattttagagccttaccaggctaaaggccccactcccacggtcctcatccttcatctcttcttttcttgtcactgtcttcctggattttgcaaactggggaacaaacctcccgaatgagttctgtaaaccggatacaagaacaaagcagcaataaagataagagaggaatgaggtcttaggaaaaaagcaaccccaaacctgctcctttcttgtagccttgagagaactccacccttgccctctgggcacattccctccagcccctgtagaccatgagtgagcaattggtgacaaagaagggagacacagagccggaactttaagggaggcagtggtgcttctatatccacgaggccacaggacgagctcacctgggaaggaggaaggggagctggctccttttctggttgacggaggagccggcagggagatcctgtttcctcatcaggggagctatgtaggaaaagataaaactgaaggagatctgcccgggtgcggtggctcacacctgtaattgcagcactttgggcggctgaggcgggcagatcaccgaggccaggagttcgagaccaacctggggaacatggtgaaaccgtatctctactaaaaatacaaaaattagctggatgtggtggcgcacgcctgtaatcccagctacttgggaggctgaggcagaatggcttgaactcaggagatggtgtttgcagtgagccaagattgtgctactgcattccagcctaggtgagagaacaaggttctgtgtcaaaaacaaacaaacgagggggatctgaaatcctcctaggttgtcactcacctatcgagacaaacgcaaaacaaaatccaacaggaaaccagtgctaagagtctcctaggctgggcgtggtggctcatccctttaatcccagcactgtgggaagctgaggtgggtggatgcccaggagtttgagaccagcctgagcaacatagtgagaccccttttctacaaaaaatttaaaaattagctggacgtggtgatgtgtgcctgtggccccagctacttgagaggctgaaatgtcacgatcatctgagccaggggagttcaggctgcaatgagctatgatcacgccactgcactccagcctgggtgacagagcaagaccctatctcaaaaaaaaaaaaatgtctgctagatggaaggccctggaaaacctgctttgaaagagtgggatggggatggagaagcagtgacctgagaacatttaactgtcaaggagggtgcagagtcccacctggagaatacactgccttaacaggtgactttgttacatttataatcccaggaattgccttctgaactgggaatagggatattctcatttggacggacactccagccctgacacggcacattctagggaaaggaaattgtggatgcaagaaacatagtgtctttaaaaactagtgaaacttagggttatatttaaataaataagggccaggcgtggtggctcacgcctgtaatcccagcactttgggaggccgaggcgggcggatcaccttaagtcaggagttcgagaccagcctggccaacatggtgaaaccccgtctctactaaaaatacaaaaattagttgggtgtggtggcgggcgcctttcatcccagctactcaggaggctgaggcaggagaatcgcttgaacccgggaggtggaggttgcagtgagccgagattgtgccactgcactccagcctgggtgacagagaaagaccctgtctcaaataaataaataaataaataaggatatgtatatcgttttgttttggctaattattttatttcttgtagatatggggtcatccttgttatgttacacaggctcctcttgaactcctgggctcaagcgatcctcttgcctcagcctcccagtgtgctgggattataggcatgagccactgcactcagccctgattgcttttctttttttattggtcgttagctcacataacaacaattcctttgttcccttcttgattaaggaagaggaggaatgtggaagaaggatgggtttgaccagcagacagaatatgagttctgtaaccctgaaaaatgcaatgttatctttgcccacagttaaaacttttttttctttttttagatggagtctcgctgttgcccaggctggagcgtagtggcatgatctcagcttactgcaacctctgcctcctgggttcagtcgattctcctgccttagcctcctgagtatctgggattacaggtgcgccaccacacccagctaatttttgtatttttagtagagacggggttttgcagtgttggccagtcttgtctcaaactcgtgacctcaagtgatcttcccccctcggcctcccaaagtgttgggattacaggcattagccaccatgcccggctaaaacatcaacccttcttaccagcgaggaaagctaggagaagcgagatccgagggccctgagctctgggagggagtgggtcacagcactagataggttgtgggtctctttcccaaagcattgctgtctgctgagctgctgtgctatgtggactgtcagtggggagacctgccggaatgttcagagccacctacctggagacggcctttcctggttcctccccgtgctgctgtgtagagggaacaggtcccaatttgccctctggctcctcagggtgatgtaaacagcccaacatggaactctgggggtccccatagaagtctcctagccttgggttctttaggggttttggaggacagagtccctctcctgttttagagacagaggaagatgaaggggtgggggatacagccactgctcatggctgacaactcaggtctcccccactacaaccaggctgcacgcgagaaggggccgaatccatttcactctctgcggggtcccaagtgcctgtaagagcatcttgtacactgttggtgctcaataaataaattatccatgactggataaatgcacaccaccaagggcagacaagactaaattatgtaccattctaatgtgctgagacatctgcaaaatagccatcctgggaaaactgggactcacagccaccgggtgctgaagaggtgatgctttggccacgtcctggccccttgcatttctgcactaacttccccatcactgaaagcaattgcgatgtgtcttcttctggcatttaagaggctaaagatgcttattgacatctttgtatatatagcgcagtggctcacgcctataatcccagcactttgggaggccgaggcgggtggatcacctaaggtcaggagttcaagaccagcctggccaacatggcaaaaccccgtctctactgaaaatacaaaaattagccgggcatggtggcacccacctatagtcccagctacttgggaggctgaggcaggagaatcgcttgaacctggtaggcggaagttgcagtgagctgagattgcgctactgcactccagcctggttgacagagcgagactctgtctcaaaaaaaaattaatatatattatatatcatatataaaatacatacatattcatatttaatatatacatacatataaaatatataattataatgtatttacatattgcatatttataattataaaatatattatttaaattatatatttatgatatattaatatattataaacattatatccttgtattatattatatatttatatatgatatatatttattaaatatatactatatatattatatatcccattatattgccaggttgttccatgtgatctaaagccaggccacgccacctcaggattcagcctcagccaaatatgtaaatatatatatttatacatatgtatttatacatacatatgtatttatacatacgtatttacatatatgtatttatgtattatatatactatatatatattttttctttttttaagacagggtctggctttgtctcccaggctagagtgaggtggtgcaactgtggatcactgcagtcttgacctcataggctcaagccatcctcccacctcaggccactcaagtagctgggacaaaaggtgtgtgccaccatgcctggctaagttttcttttgcttttgttttgttgagacagggtctcatatgttgcccaggctggtcgtgaactctggcgctcaagtgatcctcttgtctcggcctcccaaagtgctggaattacaggcatgaaccactttgcctcgccagaatctatcttttgaattaagaaaactcccttacatcgaaactttttttttttttttttgagacagagtctcgctctgtcaccaggctggagtgcaatggcacgatctctgctcaccgcaacctctgcctcccgggttcaagtgattctcctgcctcagcctcctgagtagctgagaccacaggcacgcaccaccacacccagctaatttttgtatttttagtagagacagggtttcaccatgttggccaggatggtctcgatctcttgacctcatgatccgcccgcctcggcctcccaaagtgctgggattacagacatgagccaccgtgcccagccacatcaaaactttcaatagtggctggcttgtaagacttccccaagcctggccccaacctaatcatgcattcagtgaacaaatgataagggttgactctagtgagttccacaccagatgctgtcctaagaacttgtgtgtgttaagataaaagctcaaggcagggtgctgctgttatgcctgccttacagaagtaccttgagcaattcaatattatctttgtccatgattaaaatattggcctttgccaccagcaaggaaagatgccagcctgtaatcccaggactttgggaggccgaggcaggtggattgcttaagctcagcagttcaagaccagcctgggcaacatggcgaaaccctgtctaaaaagtacgaaaattagccaaacatggtggtgcatgcctgcagtcccacatacttgggaggctgaagggggaggatgacttgagcccagaggaagagattgcaatgagtccagactgtgccactgcactccagcctgggcaacagaactagagcctgtctcaaaaaaacatttaaattaaacatttaaattaaaataaataaataaaagggcaatatggcaaaaccccatctctactaaaaatgcaaaagttagctgggcatggtggtgggcacctgtaatcccagctacttgggaggctgaggcaggagaatcgcttgaatccggggggctgaggttgcaatgagccaagatggcgccactgcactccagcctgggcaagggagtgagattccatctcaaaaaaataaataattaaattaaattaaaaggaaaggaaagatgcgagaattgacacccaagggccccaagttcccagagaggtgaaaacgttaaggcacacagaggcccaggaaccaaggctggcaccccgtccaactccagaaccagcacacttaagaatacttgagcatttactgaatgcctactatgtagtagatttctgccaaggcaggcagaacaaaaagacaaaccaacagccaggtgtggtggtgcacacctgcagtcccagctactcaggaggctgagggggtaggatcacttgagtccaggatctcacttgggtaacacagtgagatcccacctctataaaacatttaaaaattagctgagggtggtggcatgcacctgtagtctcagctactcaggaggctgaggcaggaggattgcttgagccctggaggttgaagctgcagcaagccgtgattgtgccactgcactctggcctcagcaacagagctagatcctatctctaaaaaaaacactaaagaataacactatccaggaccaggcgcagtggttcatgcctgtaatcccagcactttgggaggctgaggcgggcggatcccctgaggtcgggagtttaagaccagcctgaccaacatggagaaaccctgtctctactaaaaatacaaaattagccgggcatggtggctcatgcctgtaatctcagctactcaggaggctgaggcaggagaatcgcttgaacccgggaggcggaggttgcagtgagccgatatcgcgtcattgcactccagcctgggcaacaagagtgaaactccatctcaaaaaaaaaaaaaaaaaaaaaagaataacactatccaaaccccagatggactctttccaacctcagctctacattacacacttacacatcgtgaagtaaacctactgaatgagtctctctttcctcgacgccaattgctagggtctgcatcagtccccattcagctgtttgccctccactaaaccacagcaatcttcctgtaattgcttctaattcttcttcttcttctttttttttttttttgagatggactctcgctctgttgcccaggctagagtacagtggcatgatctcagctcactgtaacctctgcctcctgggttcaagcaattctcctgcctcagcctcctgattggctgcgactacaggtgcaagccaccatgcctggttaatttttttgtattttcagtagagacgggttttcaccacgttggccacactggttttgaactcctgatctcaagtgatctgtctgccttggcctcccaaagtgctgggaatgcaggtgtgagccatggcgcacggtaagttgcttgtaattctgtcagttacagttcgggagtgcccgtttagaactttatcccactgctgtgtatttgcttagctctcgctgagagaagcattttcctttgtcctctgactacagctggaggatctccagggcaggaactgagtgcaatgcaccctttgatctccccttcgccctgccctgccccatcaggtgcccacctcaaaggatgtaccaccacaagtaaagctccgatggacattgcttatagaaacacattcctaaccgtccgggtgcagtggctcatgcctgtaatctcaccacgttgagagggtgaggtgggcagattgcttgaggtcaggagttcaagaccagcctggccaacatggtgaaaccctgtctctactacaaatacaaaaaattagccaggtgtggtggtgggcacctgtagtcccagctaatcaggaggctgaggcaggagaatcacttgaacccaggcggcggaggttgcagtaagccaagactgcaccactgcactccagcctgggtgacagagcaagactctgtctcaaaagaaacacgaccttgtggtctgccagaaaagacaaaatatagctgctttgtttatttggtttcttgagattctcaaacacttgctcacttggctgactgaatggccatttgtaccaaataaaaagcaaaaaaatatcaatggcattgaagagtcttctctttccttcctgtgatctgtccacatgggactaatttaagaaaaaataaggcagaaccttgtgttcgacaccaaagactaaagacattgggagggaaaaggcctctttcaccacctgccagaattttcttcctctctctccacccttccagcacacacagaaagggttgtccagggccagcccagaggtccactgagctggggagtctaccgccaacagaggccccaagtgacctgctgtgggtggacctggctgtccccagcttccccctccaaggtcagagaaattctgatgcctccaagcagcctgttgctcatctctgcacaaaacatgttcaatctgctgatcatttcctctcctgtcccatatcttgggggaaaaaacatgcacaccattccctaaattcatcagccactaaattaaaaagtcatttcaaaattttgaagaaatttaacttactttagaaaatgataggcaaatggaactctactacatcatattgggagtttgtctttctgacttggtttgttcctttttttttttagacagagtctcactctgtcgcccaggctggagtgcagtggtgcaatctcagctctcctgggctcaagcgagtctcgtgtctcagcctcccaagtagctgggattacagacacatgccaccatgcccggctaatttttgtgtttttagtacagatggggtttcaccatgttgaccaggttggtctcgaaccctgacctcaaatgatccatccacctgcctcggcctcccaaagtgctcagattacaggcatgagccatcgtgcccaacaatctttctttttttctaagagacagggttttgttctgtggcccaggctggagtgcaggcgcaatcatagctcactgcagcctggaactcctcagctcaagccatcctcctgcctcaatctcccaagtagccaggactacaggtaggcaccaccacactggttaattaaaatttttttttttttttagagactgggtaacattatgttgctcaggctggtcatgaactcctggtctcaggcaatcctttcacctcggcctcccaagtagcctggagtacaggtgcgtaccaccaagcctggctattttggggtgtttttcttttcaaatgatgaaattgtataggtatgttgacaagtaaacatggtcatgatctaccacaaagtgaaaaatggaggttgcagatcagtaagtgtgatgattcgattttccaataaaaacattttatctgggccaggcacggtggctcatgcctgtaatctttgggaggctgaggcaggcggataacttgaagtcaggagttagagagcagcctagccaacatggtgaaaccccgtctctactaaaaatgcaaaaatttgccaggcatggtggcaggtacctgtaatcccagctactcaggaggctgaggcatgagcatcacttgaacccaggaggcagaggttacagtgaaccaaaatcgtgccactgcactccagcctgggtgacagagtgagactgtctccaaaaaaaaaaaaaagaaaaaagctcaacactgtatctgtatatatacagaaaaagtctgaccaggcatggtggctcatgcctgtaattctgagcacattgggaggccaaggcaggtggactgctggagcccagaagttcaagaccagcctgggcaacatagtgaggcctcgtctcttccaaaaaatacaaaaattagccagtcatggtggcacacacctgtagtcccagctattccggaggctgaggtgggaagatcacctgagcctggggaggtcgaggctgcagcgagctatgattgtgccactgctctccagcctgggcgacaaagcaagactctgtctcgaaaaaaagaaaaaaaaaaaagctgggtatggtggctcactccagtaatcccagcactttggctgaggcgggcagatcatgtgaggccaggagttcaagatcagcctgggcaacatggtgaaaccccatctctactacaaatacaaaaattatctgagcgtggtggcagacacctgtaatcccagctactcaggaggctgatgcaagagaatcgcttgaaaccaggaggcggaggctgcagtgagtcaagatcgtgccactgcactccagtctgggcaacagagtgagacatcatcttaaaaaaaagtctgagctgggcgcgctggctcatgcctgtaatcccagcactttgggaggccgagatgggcggatcacctgaggttgggagttcgagaccagcctgaccaacatggagaaaccccatctctactaaaaatacaaaaaaattagctgggcatggtggcatatgcctgtaatctcagttacttgggaggctgaggcaggagaattgcttgaatctaggaggcagaggttgcggtgagccgagatcgcgccagcctgggcaacaagatcaagactctgtctcaaaaacaaaaacaaaaaagtctgggctgggcgcggtggcctactcctgtatccccagcactttgggacaccaagacgggcagatcacctgaggttgggagttcaagaccagcctgaccaaaccctgactctactaaaaaaatacaaaaattagctcagcatggtggtgggtgcctgtaatcccagctacttgggaggctgaggcaggagaatcgcctgaacttgggaggtggaggttgcagtaagccgagatcgcgccactgcactccagcctgggcaacaagagcgaaactccgtctcaaaaaaaaaaaaaaaagtctagaagcagtgtaccgaggttagagtcctgtcctgtttttcatgctgttctacagttgatcactgtcctatggctatgctagatgtcaacattagggaaagcttggagaagggtagctagaactctctgaattatttttgcaacttttctttaagtcccagattacttcaaaataaaagttttcttaaaagtctggaagaagaattgttaacagcagtgtacatttgtgtactaccttaggtcagttctgggtgctttacagatactaatccacatgtgagctctaagggcaggattcttcaccttggaggacatttggggctggatcattctctgtggctggggggcatcctatgcatggtaggatatttgagcagcatccctggcctccacccactagatgtcagtataatttccccagttatgaaaaccaaaaaaagtctctaggccgggcacggtggctcccacctgtaatcccagcactttgggaggctgaggcaggcagatcacctgaggtcaggagtttgagaccagcctggccaacattgtgaaaccctatccctactaaaaatacaaaaattaggcgggcgtggtggtgcacatctgtagtcccagctacttaggaggctgaggctgcagaatcgcttgaacccaggaggtggaggctgcagtgagccaagatcttgctactgcactccagcctggacgacagagtcagacttggtctccaaaaaaaaaaaaaataaagtctccaaacattgccagctgtctctggaggtcaaaatcccttcctctcacctagttgagaaacactgctctaaaggaaagggtagtggcttttattatccccaatttacaaaaggggaaactgtggcacagaggaaatcatccaccaccacacactgagcagaactgggatgaacccaggttttgggccccagagtaaaacactcagccacataccgagtggccttgtagtacatcaagcattattccaggggtcatctctgggactggttccgcagggaggctgtcccgctgccctgaagcccggggaggcctcctctaagctgtgggaccccaccagaggcttgcagaagctccagaaaactttcacttttacttttcctgtatgccctctccgttatttctatttttctttctttctttttttttttgagacagggcctcaatctatcagtcaggatggagtgcagtggtacgatctggattcactgcaacctccacctcccagttcaagcaatcttcctgcctcaacctcctgagtagctgggactacaggtgcctgccaccacgcccagctaatttccttactttacattgtagagacaggatctcgctatgttgcccaggctggtcttgaactcctggactcaagcgatccgcccacctcggcctcccaaagtgctaggattacaggcgtgagccaccacaccggccttctatttttcttaccagcatgaattaaatcctttttgtctttttcttttttttgagacagagtcttgctctgttgcccaggctagagtgcagtggcaccatcttggctcactgcaacatcggactcccaggttcaaacgattctcctgcctcagtctcccgagtaggtgggactacaggcatgtgccacaacacctggctaatttttgtatttttagtagagacggggtttcaccatgttggtcaggctggtcttgaactcctgaccttgtgatctgcccgcctcggcctcccaaagtgctgagattacaggtgtgagccaccgcacccggccaatccttgcttccttttaaggaggttaaggcagtcgtgttagccagatctgcaataaacaagcccacattcttcccacaagcagaagcagaaatcaacaagtgtccatttgaatgaacgtacctgaggtccgcagcttcttcctcttagtcattttatcttccccttgagaaatctgaaaacaagcaaaatctctcatcattataagcagtctctgtctctgtttatatccagtggctttggctgagagcagaggttacccctacctccacctcagcccatttggctgccccaggggtcagatggctcccactgggacacaggatgggacacagagtcacagccactttgggccatggccaggtaggaattcaaacctcctccaaactgaagatcttatgcccaggacctgaaagacaaatgggccctggggggtccttatagatagccccggggacccagactctggtccctaggatgaaacagcctgtgtgaagcccctccctccagactggggtatctgggggcccttccaaggacacttgaggactctccaggggcctctggagaccagcctggccaatatggtgaaaccccctctctattaaaaacacaaaaattagcctgggcatcgtgacgcacacctgtaatcccagctacttgggaggctgagacagtagaattccttgaacccatgaggcagaggttgcagtgagccgagatcgctctactgcactccagcctgggcgacagagcgagactccgtctcaaaaaaaaaaaaaaaaattagtcaggtgcggtggcacacacccgtaatcccagctactcaggaggctgtggtacaaggccaggaggcagaggttgcaatgagccaagatcgtgccactttaaaggggacagctgggtccttggaggggaaagagctgccataggccggtttctcccagccttgggggcgaggcaaaccagaacggacctgggccacagaagtcgttgaggaccctctgtccttatcagaaacgagctctgcctggatcagttgggaataagtcgcttgaattatccgcgttactctttttggaaaaaataaatggccaaattggccctcacagaacgctggaggcctcgagtccggaggtgaaagatggaaaggcctgagggtgggcgctgtagaccccgctcccggtgacaagccccacactgacactacgccgaccaccgagaagtgaggactccacaggccgagagcccacgtgaagccggagcccgtcggtgactgacagacgctctgaaccccacagatgtcgccgcccctcacacctgcgcgcgctctgcctctttcccgcgccccgcgaggtcccgccccgcgcatgagcgacgcaaacaccgccctcgcagcccgcgacagtcagcaccgccccagccaggcgcctgcgcgcccacgcactacctgccgggagttgtagtttcggctcggcagacccggcgagcccagtggccgcgctccggtgcggcggcgcccgaggcccgaggcggaagtgggacggccaagcagggaagcgagggctcgggatcgacggccgcggggcgccgacgaggagtgcaggactcaggaagggcgagtgcgcggcgacagagcccggggaaggaggcagggcaaggccgggcttgggggcaggtggtccgggcatccagccttgaagatgcacaagaggaaaggacccccgggacccccgggcagaggcgccgcggccgcccgccaggtgagtttgcgccccacggcccgacctggggatccctccccacccccgtcactcgctcagggaagggccccaccccccagggaagcccgatctccgccccacaggtaagccccggtccccgcctccccccaggtgaggctccaacaccacccaagtgtggcctactggccttggctccccagctcctggggccctgccccgggttcggggccacctgttgccacagctgctccagtcgaggaggggcagtcctcggacttgacacatcaaacccttgcatcagtcgggccatgtcagactctttttattccattgtacagatgaggactttgagactcagagacgtgaagacatctgcccaaggtcatagggattaacagcttggccagggctaagcacaaatccagggctgcagccataagcttatggcactgtggctggaccccttctcactctcccgacttctttgccccaggcaccagatagtttgatttttctcagttttgatggaaggagcccaggacatagcttggtgttcagatattagagtctggctgacctgaagttccctcctggcctctgtacatcggacacttgactttacagctctgagcctcagctttctcatctgtaaaatggagatctctataatcccagcacttcaggagatggaggcggaggcagaggtgggagagtcatttgaggccagagtttgagaccagcctgggcaaaagcaagacccccgtctcgacaaaaaaagactaactgggcatggtggcatgtgcctgtagtactactacttgggaggctaagaagggaggattgcttgagcccaggagttcaagaccgcagtgagctatgattgcgctacttctgctccagcctgggtgacagaacaagactctttctctaaaataaagataaaaaattaaaaatggaagtccggggtggtgtctcacacctgtaatcccagcactttgggaggccatggcgaaaccccatctctactaaaaatacaaaaattagctgggcatggtggcgggcacctgtaatcccagctactcgggaggctgaggtgggagaatcgcttgaaccgagaggcggaggttgcagtgagctgagatcgcgccactgcattccagactgggtgacagagcaaggctccttctcaaaataaataaataaattccttctgaaaataaataaataaataaaaaattaaaaatggagacctccaagagaccctacattacaggacagttgtagagagtcattgagatagtttatggaaagtgctagaacatagcactcaataaatgttactattatcattattactagttggtggaaccatacataattgccaatatttggccattttttacctacaggaaaggcaatttcatatggttaaacacgatgttatcacatcatgattggtcattagccaagataggaagacgggtctgcatggcaaacctgcattgtggttaggggttctttttttgtttgtttgtttttgagacagagtcttgctctctcgccccaggctggagtgcagtggcgcaatctcggcccactgcaacctccgcttcccgggttcaagcgattctcctgcctcagcctcccgagtagctgggattacaggcatgcgccaccatgcctggttaattttgtattttttagtagagacggggtttctccctgttggtcaggctggtctgtctcgaactccccatctcaggtgacccgcctgcctcggcctcccaaagtgctggggttacaggcgtgagccaccgtgcccggcctaatttttgtatttttagtagtgatgggatttcaccatgttggccaggctagtctcgaactgctgacctcaggtgatccccccaccttggtctcccaaagtgctgggattacaagcgtgagccactgcacctggccctgtcgtcagggcttctaattgctcttcttttttttttggagacagagtcttgctctgttgcccaggctggagtttggtggcgcaatctcagctcactgcaacctccacctcccaggttcaagcaattctcctgcctcagcctcccgagtagctgggattgcagacaccgccagcactcccagctaatttttgtatttttagtagagacggggtttcaccatgttggctaggctggtctcgaactcctggattacaggcgtgagccaccgcatgcagccatcatgctcttgaagcccaaccttcccacacagcccctctgctgaggatgctggaaagaaaagcccaagtgtacagagtagctttgctttgggcaaagtgtggagcctgcttccttccctccttccctccctccctcgcttccttctttttttccttccttccctccttcctccctccctctctccctccccggctccatctctctttctttctttcctttcaacagggctttactctgttgcccaggcggagtgccgtagcacagtcatggctcactgcagccttgatctccccaggctcaagtgatcctcctgcctcagcctcccgagtagctgggaccacaggcacacagcacaactcccagctaattttaaaaagttttttttcctgtaatcccagcactttgggaggccgaggcgggcagatcatgaggtcaggagatcgagaccatcctggctaacaaggtgaaaccccgtctctgctaaaaatacaaaaaaaaaattagccgggcgtggtggcgggcgcctgtagtcccagctactcgggatgttgaggcaggagaatggcatgaaccccggaggcggaggttgcagtgagctgagactgcaccactgcactccagcctgggtgacagagcgagactctgtgtcaaaaaaaaacaaaaaacaaaaaactttttttttttttgtagagttgggggtctcactgtattgcccaggctggtctggaactcccagacacaagccatcctcttgccttggcctcccaaagtgctgggatgacaggcgtgagccactgcgcccagccaggggcctgcttttcccactgaacttggcccagcagcacatcataagtgtggattcagatcagagagctgggtctcttgccctttgccccaggttgaactgtgccagagggcctggcctatcttggaacacctgttctgggcttgttccagcctcctggcactccccagggaaatggctttccctgggagaccttgtttccttcctcccaaggggactctctggccatcatggctgcctctagccatgtggtgaaccaaaggtctgactgaacccttgctgttcccctagctgggcctgctggttgacctctccccagatggcctgatgatccctgaggacggggctaacgatgaagaactggaggctgagttcttggctttggtcgggggccagcccccagccctggagaagctcaaaggcaaaggtgagatggttaacacaccctcagaacattttctgatctcctgcaagtggttcgggcgcagaactgggggcactgggtaggtaggggaaagaagacagagaagacccctgttctcctggagccaatgatctgggtaagagagtcaagatcgactctgaggccgggcacggtggctcacgcctgtaatcccagcactttgggaggccgaggcaggcagatcatgaggtcaggagattgagaccatcccggctaacacggtgaaactctgtctctactaaaaatacaaaaaaaaaaaaaaaattagccgggcgtggtggcgggcgcctgtagtcccagctactcaggaggctgaggcagaagaatggcgtgaaccagggaggcggagcttgcagtgagccgagatcgcaccactgcgctacagcctgggcgacagagcaagactccgtctcaaaaaaaaaaaaaaaaaaaaaaagatcaagtctggaccgagactgagagttggaatccgagctctgccacttactggttatgtgacttgatgagtcacatcatgtgctttggcctcagtttcaccatctgtaaaactggaataataaccatgttataggagttaatctggagtccataagtatttcacccagggccccctcacacacaataagctcatgtcagccaggcacattggctcatgcatgtaatcccagcactctgggaggccaaggtggacagatcacttggggccaggagttcgagaccagcctggccaacatggtgaaaccctgtctttactaaaaatacaaaaattagccaagcttggtggcgaacacctgtaatcccagctacttgggaggctgaggcatgagaatcgcttgaatccaggaggcagcagttgcagtgggcagagattgcgccactgcactccagcctgggtgacagagcaagatcctgtttccaaaaaacaaaaaagagagaagcttcattcaggcatgaactactgtgctgttggctgtgaattcaaagttaatgaatgaacgatatctattcaggaaggtgtcttcaaacagaaacacacatagagcaaggttgtgtattgatcagttgattaaaattttgtgaccagagctgggtgtggtggtgcatgcctgtaatcccagctactcgggaggctgaggcaggaagatcacttgaggccaagagtttgaggctgcagtgagctctgattgggccactgcactccagcctgggtgacagagcaagatcctgtctccaaaaaaggttatgactggagattcacaggaacctaagcttaaatttcccctaggagcaacagtcttatagtcattaatttagtcttcaaagcagctttatagaatgtaacataactaataacaagatattggcaatatgctattctaagagcttcattgaccttctctgctccaacctacctatgaaggaggaactgttgtcatccccgtgtcacagagggagaaactgaggctcagagaggtgacatcacttgccgaagttctcacagagagaaagttgcagagctggggttttttttgttgttgttgtgtgtgtgtgtttttttttttttttttggagacaaacccttgctctgttgcccaggctgcagtgcagtggcgcaatctcagctcactgcgacctctgcctcctgggcttaagtgattctcctgcctcagcctctttagcagcggggattacacgccaccatgcccagctaatttttttttttttttttttttttttttgagacggagtctcgctctgtcgcccaggctggagtacagtggcgcgatcttggctcaccgcaagctccgcctcctaggttcacgccattcccctgcctcaggctcccgagtagctgggaccacaggcgcccgccagcatgcctggctaattttttgtatttgtagtagagacggggtttcaccgtgttagccaggatggtctcgatctcctgaccttgtgatccacccgcctcggcctcccaaagtgctggggttacaggcgtgagccactgcgcccagcctaatttttgtatttttagtagagacagggtttcaccatgttggccaggctggtcttgaacgcctgacttcaagtgatccttctgcctcggcctcccaaagtgctgggattataggcgtgagtcactgtgcccggtctgcagagctgggttttgaattcaggtagccaggccccagacctgaggctgaataaggaagagatgaaatggggaagtcagcgagaagtgggatcacctagcgtgtccaggatgggaaatgggggctcttggtgtacgaccctggtccacctggggcatccccctaccgccaggtcccttgccgatggaggccattgagaagatggccagcctgtgcatgagagacccggatgaggatgaggaggaggggacggatgaggacgacttggaggctgatgatgacctgctggtgagcactgagggcggggtgggggctctgatccggttgcccccatccagcaggcccttatatcctgccctggctgtgtgtccctgcaggcggagctaaatgaggtccttggagaggagcagaaggcttcagagaccccacctcctgtggcccaggtacagtttggatgactccactcccttgaaccacaacccaacggacagcccggggttcaagacctagccttttttatgagatggagtcttgctgtgtcacccaggctggagtgcagtggtgccatctcagctcactacaacctctgcctcccaggttcaagggatcctcccacctcagcctccccagtagctgggattacaggtgtgtgccaccacgcctggctaatttttgtattttttggtagagatggtgtttctctgtgttggccaggctggtcctgacctcaagtgatccacctgccttggcctcccaaagtgttgggattacaggcgtgagccaccgcgcctggcccacccttatccttcacagccatgtgacccatatcaggtgggtgacatgatgcttctgaaaccccattccctccactgggaaatggggaccatgatttctgcctcactggggcaggggaggctggtccagggatgacatggggccgactgttactgcagaaggggctaacaggggcatcccaagtggggtcaccacccacactgtgcccctgccctcccacagccgaagcctgaggcccctcatccggggctggagaccaccttgcaggagaggctggcgctctatcagacagcaattgaaagcgccagacaagctggagacagcgccaagatgcggcgctacgatcgggggcttaaagtaagtgggcagagggcagggtacagggaccccccgccaaccccgatgccctgcaccaagctcttggcttctcccaaaccaatactcacgccttatcttagacactggaaaacctgctcgcctccatccgtaagggcaatgccattgacgaagcggacatcccgccgccagtggccataggaaaaggcccggcgtccacgcctacctacagccctgcacccacccagccggcccctagaatcgcgtcagccccagagcccagggtcaccctggagggaccttctgccaccgccccagcctcatctccaggcttggctaagccccagatgcccccaggtaggtgatgggcagggccgggctgatatgggatccgagtgggccatctggcaggatgctgctctaggggggtgccggctgtgcactgattgtgagatattttcaacaccctgagtcctggggtcttcaagcccctggagttcatgaatacctcccaagcaggacatggatacccagagagttttttttgttgttattatgatattatgataaaatatagatcacatttgccattaaaaattattttagttcttttttttgagatggagtttcgttcttgttgcccaggctggagcgcagtggcacgatctcagctcattacaacctccacctcccaagttcaagcgattctcctgcctcagcctcccaagtagctgggattacaggcatatgccacacttggctaattttgtattttgagtagagatggggtttcaccttgttggccaggctggtcttgaattcctgacctcaggtgatccacccacttcggcctcccaatttgctgggattacaggcatgagccactgtgcccggctttttttaattctttgagacagggtcttactccatcacccaggctggagtgcagtgatgtgatcatagctcagtgtagcctcaacctcctgggctcaagggatcttccctcaccttcaccagtagctgggactacaggcatgcaccacacacttggctaattttttttttttttttgagtcggagtctcgctctgtcacccaggctggagtgcagtggtgcgatctcggctcactgcaacctttgcctcctgggttcaagcaattctcctgcctcagcctcctgagtagctggcattacaggtgcatgccaccacacctggctaattttttgtatttttagtagagacggggtttcactgtgttagccaggatggtctcgatctcctgaccttgtgatctgcctgcctcggcctcccaaagtgttaggattacaagcatgagccaccacgccaggcctcatcgccttttttttttttttgaaacagagtctcactctattgcccaggctggagtgcagtagcatgatcctagttcactgcaacctgcctcccaggctcaagcaatcctcccgcctcagcctcctgagtagctgggattacaggcatatgccaccgtgccccatgcccagctaatttttgtactttttgtagaggtgccatgttgcccaagctagaacatatcttctaagaggtttttcttcctaacctccccctaggaaaggaaggcctccctccctctctttgtgatatgaacacggggctttgccccaggtccaaacacttccctggcaggaagcaaagagacaactcaaaatactggcatgggtttgagaaagcaaacactgggtcactaaatccttctgcaaccaagctagtttccaagccattgtttttgacaaagttcaaggattactggaattgtcacctgaaattgtcaactgaaacgaccaaaaatttttcacaatggaagtttggcataaaacttgtcaggagttcaaagaatacaaagacatcacagtaacaaaattctgtgtcttccaatctatttgttaatgtgaagtaggtttctcaatactttaatttttttgagacggagtctcgctcttgtttccaggctggagtgcgatggcgtgatctcggctcactgcaacctccgcctcccaggttcaagtgattcacctgcctcagcttctcgagtagctgggattacaagcgcccaccaccaagcccggctaatttttgtatttttagtagagacggggtttcaccatgttgctgcccaggctggtctcgaactcctgacctcaggtgatccgcctgctccgcctcccaaagtgcggggattacaggcgtgagccaccacccctggcctcaacactttaaaaaagaaaaaaagtgcagatgtagtggctcatgcctgtaatcccagcactctgggaggccaggagttcaagagcagtctaggcaacatagcaagaacccatctctacataaaaattaagaaattagccgggtgtggtagtgcatgcctttagtcccagctcctcgagaagctgaggtgggaggttcgcttgagtccaggagttcaaggctgcagtgagccgtgatcgtgccactccaagtctgggcaacagagcaagatcttatctctaaaaaaagaaaaaacagaagaggattgaatgggagaaacgagttgattgttagggattggacccagctccaattatgtcagcaagaggtacatttctggtagaattttgctcttggtgtaccaaaactatcaaatagctcagcaggggctgggcgtggtggttcacacctgtaatcccagcactttgggacaccaaagcgggcggatcacttgaggccaggagttcaagaccagccctggccaacatggtgagacctcatctctactaaaaatacaaaaattagctgggcgtggtggtgcatgctggtagtcccagccactcgggtggatgaggcaagagaatcacttgaacccagaaggcaggggttgcagtgagccacgatcacaccactgcactccagtctgggcgacagagcaagactctgtctcaacaaacaaaccaacccaaaaagctcagctgggtgtggtggctcacacctataattccagcactctgggaggccaaggtgggaggatcgcttgaaccccggagttcgagatctgtctgggcaacatagggaaactgcgtctctataaaaaattaaaaattagccagccatggtggtgcatgcctgtagtcccagctacttgggaggctgaggtgggagaatcacttgagcctggaaggttgaggctgaagtgagctgtgattgcaccactgcactccagcctgggtgacagaatgagaccctgtctccaaaaaaataaaataaaataagcttgatgtatttacgttttgctcaattacatgctagtaataattataacaataattcaacccggaaaaacattgtttttaacaatgaaagatttataatcacaggaaataaaaccaatacaatgtcaaaggtgtgtcacttctacctccaaacatattttcagggaagtaagcctaagtttaaagcaatgggtccagttgttagtctgaaaaaaagatactgcgtgccattttctgggtgtttccagattttgcagacactgggtggtgtctttattgtactgtgttattttatactaagaattgcacttatagctttaaacattgaggtacttccccagaaaacatactgagcatattatttgaaactgtaactaacacactgtttaaaaagcactgaatactgggtttcctaactttgcaaacacactgcataaatatattttggttgtataaatatacaatagggtaggcaaaaaaggctttcaaacacacagctatatcatgttagcataaatttctgtgggggacgtggatggaaataagagaagactcaaaattcccaactgcttaaagtgagtcccaggatatatttaaaaagtgagttgggcatggtggcacatgcctgtaatctctgcactttgggaagctgaggtgggaggatcacttgagcccaggagtttgagactagcctggacaacatagtaagaccccatctctacaaaaaaaaataaaaaaccagccgggcatgcaggtgcatgctctgtagccccagctactcaggaagctgagatgggaggatcgcctaagcccggtgtctgaggctatagtgagcagcagagcaagactctatctctttaaaaaaaaatacattaaatatggccaggcacggtaactcacacctgtaatcctactttgggaggccaaggtgagcagatcacttgaggtcaggagtttgagaccagcctggccaacatggtgaaaccccgtctctactaagaatacaaaaattagccagaaattgggaggcggaggttgcagtgagccaagattgtgccactgcactccagtctgggcaacagagcaagacccagtctcaaaaaatacattaaagccaggcgcggtggttcacacctataatcccagcactttgggagtccaaggtgggcggatcacctgaggtcaggactttgagaccagcctggccaacacggcgaaaccctgtctctactaaaaacataaaaattagccgggcatgtgcctgtaatcccagctactcaggaggctgaggcaggagaatcacttgaacccaggaggcggaagttgcagtgagctgagattgcgccactgtaccccagcatgggcaacagagtgaggctctgtctgaaaaagaaaaaaaaaattaaataaataaataacaaatggtttacacggtgaacttggcccaggccctggaggcttcctgtatgttgttctcccttccaggtccctgcagccctggccctctggcccagttgcagagccgccagcgcgactacaagctggctgccctccacgccaagcagcagggagataccactgctgccgctagacacttccgcgtggctaaggtgcgtccagcctgacggacaggactggagggatggggcaggatgcttcccacgtggcctggtggcaaagcacccaaatttgcatcctagcttggtcactccctagcaatagtttgctgtaagtcttggagcctcagtttaccccctctgtgaaatgggcacgtgtgttggaagaggattaagcaagatggcacaaatggaagggagggagctagaagtcctcggtggcatggaagggcccggaggctccccacagggtccaagcccccaactgcacctcttcttctaatctcctcttccttctcccagagctttgatgctgtcttggaggccctgagccggggtgagcccgtggacctctcctgcctgccccctccacccggtgagaaccctgccatgcccactctctgggatggtttcaggcatacactaagttctccttgatgctgccacccctgttggtcaggcccagagaccaccctcaggccagaccagcttgtcgggggtgcagctaacaagcccctcattggcctggacctctctgtccccagaccagctgcccccagacccaccgtcaccaccgtcgcagcctccgacccccgctacggcgccctccacaacaggtaggttctgggaccctctggggttgggggcaggctggagccagactgtctacccatccgttgactcttaaccttgtccccctgtccggcccagaggtgcccccacccccgaggaccctgctggaggcgctggagcagcggatggagcggtaccaggtggccgcagcccaggccaagagcaagggggaccagcggaaagctcgaatgcacgagcgcatcgtcaaggtgccctgggggttccgggggaggtggggcgagtgggcagcccgggagccctcccacaggcagccctaacacctgtggccctcgcagcaataccaagatgccatccgagcccacaaggctggccgagccgtggatgtcgctgaattgcccgtgcccccaggtaggccttgcccctgtaggcctcgccccagtaggccccgcccccgtaggccccgcccccagaggccccgccgctggcaggctgtgccccaagctcctgttcctccagcctctgagccttggcagatgctattactccccatagcacaggctcagggagctgaatacaacatattcaagggttttgtaaacttgttaatcagtgggagcttgacattggacatgatgtgtctgcactgtagaaattggcaaaccggctggacgaggtggtcatgtctgtaatcccagcactttgggaggctgaggtgggaaaatcacttgaggccaggagttcaagaccagcttgggcaacgtggcaagaccccgtggctacaagaaatttaaaaattagcctggtgtggtggtgcacacctgcagtcccactctagatcatgccactgtactccagcctgggcaacagagcgagatcctgtctcaaaaaaaaaaaaattaattaattaaaaaaagtaaaggcccaagactctataggtgggagaggaatctgcatctccaccataatggtgtgagttggtctccatcctgacacacaataaccaggcctcgactggccacccaggcttccccccaatccagggcctggaggccaccaagcccacccagcagagtctggtgggtgtcctggagactgccatgaagctggccaaccaggatgaaggcccagaggatgaagaggatgaggtgcctaagaaggtttgagggttggggccgggcgcagtggctcacacctgtagtcccagcactttgggaatccaagatgggaggatcgcttgaggccaggagtttgagaccatcctgggccacacagtgagacccccgtctctacaaaaaaattttttaaaattagccaggcatggtgggactcacctgtagtccctgctacttgggagactgaggtgggaggatcacctgaactaaggagttcaaggctgcagtgagccatggtcatgccactgtacgccagtctgggtgacagagcaagacctcatctccaagacaattaaaaaaaaaaaaaagtgtttggtgagaattgcttgaaccgggaggcagaggttgcagtgagccaagatcgtgctactgcactccagcctggacgatacagtgatactctgtctcaaaaaagaaaaaaaaaaaaaaaaaggtgtttggggccaggggctttgagtgaggcaggggagtagcaaagtcctgggagcccactaaatgaccactgttgtcaccatcagaccctgatccttggggactggactcatcacaggcgctacgaaatctctaacatcctctctcttcctctacagcagaacagccctgtggcccccacagcccagcccaaagccccaccctcaagaactccccagtcgggatcagccccaacagccaaagcgccccccaaagccacatccaccagaggtaagttccccctccccgccccagctgcctgttgcctggctgtggcctgggcagcacccatagcagctcctatgcccacagcccagcagcagctggccttcctagagggccgcaagaagcagctcctgcaggccgcactgcgagccaagcagaaaaacgacgtggagggtgccaagatgcacctgcgccaagccaagggactggagcctatgctggaggcctcgcgcaatgggctgcctgtggacatcaccaaggtgaaccttctgggcttgtgggaactgcccaggcacccacttgtcaggctcctgccccttagcagccacgtgaactagaagtgtattagtcaaggtccagctgctgtaacaaataggtcctcccaagacaatggctgaaaggagacagacatttattatgtttcttgcatgtaccacccagggcagtctgggctctgcaaatgggaggtcctccagggcctgagtttcttccaccttattgctttgctgcacctgagggggttgtccttgtccacatgatccaagtggatcctgtcagaaggactagagaaagaggcagagctagtagtcccttttaaaggaagtgacatcactattgcttgtctcccattggccagaactaagtaacatggccacatttagccacagaggaggctgggacatgtagtctcttgttggtgcactgtgtgaccagcctgagctccattactagggaaggggaggggatcagatctggggagacacttagattctgccacttaggacaggaccattcctttttctctgagcatcatttttctcagagaagtggggatggccacccctgcctcaaagaaagacagccaggattcctcatgtgatagaatagtactcataataggaaacatttgaggagcttgaactgggcgcccagcaaaggccacccagtttaaggaagtgacatcacttttgcttgcctcccattggcccaaacagtcacatggctacatttagcctcagaggagcctgggacatgtagtctttgctggacactggagacatggccttgagcaaaaaaggcaaaaatccacactctctctggacatggtgggtcacacctgtaattccagctacttgggaggctgaggtgggaggattccttgaggccaggagctcgaaactagcctgggaaacacagtgagactcactgtcatggagtggatgttctaattgagagaccacaagaaacacacaaataaatacagcaccttatcacggcccatgaagactgcaccatctgccccatcagctcccttgcctggtctctttcttgtttttgttttgttttgttttgttttgagacggagtctcgccctgtcatccaggctggaatgcagtggcacgacctcagctcactgcaacctctacctcccaggctcaagcgattctcctgccttagcctcccgagtagctggaactacaggcacacgccaccatgcccggctaatttttatatttttagtagagatggggtttcactatgttggccaggctgggcttgaactcctgacctcaggcaatccacctgcctcgacctcccaaagtgctgggattacaggcatgagccactgtgcccggcctgccccttctctttcacccaccccctcgctcactcttccccttgctgtctggtagcctcaaacaccaggcactctgcaacctcagggcctttgcacatgcagttcccactgcctgaatgcttttcccacagacacctgtgtggttcactttctcccatcattaggtctctgctcagacatcacatctccaggaggcctaccctgagctgtctaaaatccctccctgtcacccagatccctctgctcctcctcccagctctgcctctccctgtggcatgtatcaccttctactctctcatatgatttacttatttcttctgattattgcccatctcccccaagagaatgtcagccccacgagggcagggattttgttctctcttcttcatccttgtgtccccagccccaaagcagagcctagcgcacagtaggggctccatacatgatttctcaaactcttgagctcaagcaatccacccgccttagcctcccaaagttctgggattatagacatgagccactgcacccggcaccatacatgatttctggggtgactgaaggatgcccttgttaaatgggacaatggaaggatcaagaagaaagaacagaggccgggcatggtctttcatgcctgtaatcctagcaattaaggaggccaaggccagcggatcacttgaggtcaggagttcgagaccagtctggccaacatggtgaaaccctgtctctactaaaaatacaaaaattagccaggtgtggtggcaggcgcctgtaattccagctactcaggaggctgaggcaggagaatcacttgaacccgggaggtggaagttgcagtgagctgagatcccgccattgcactccagcctgggcaacagagcgagactccatctcaaaaaaaaaaaaagaccagagaagggtgacagagccgtggtcagggaatgcccctcgtcaaggaagaatgacatttctgcagagccctaggtgggcctgcttgtcctccttacccccgccaccagcctcgtcctccccaggtgccgcctgcccctgtcaacaaggacgactttgccctggtccagcggcctggcccgggtctgtctcaggaggccgcccggcgctatggtgaactcaccaagctcatacggcagcagcacgaggtgagggggaggcccccagcccatcccccaggagcgtgaccctccttcccctctcttcccttccctcgactcactgccttctgtttccccagatgtgcctgaaccactcaaaccaattcacccagctgggcaacatcactgaaaccaccaagtaagtgccctgacctgtgccagacacttgcacccccagccacccatccccagggccagggacatgagcagggccctcccaccggcaggtttgaaaagttggcggaggactgtaagcggagcatggacattctgaagcaagccttcgtccggggtctccccacgcccaccgcccgctttgagcaaaggaccttcagcgtcatcaagtaaggctcctgatctacgccccaccacgtggccccagtggccctttggtggcggtggggcgggttgtgctccccagaagctggcacaagatttacatctggaagaaattttggataggtggaagagcacagagcatgcaaaggctctggggcaggcatgagatacaagtgaaggatggtgagggtgcagtcacagtgacgcatttgggaaagatctagagagtgcaaaggtgtatcttgtcccagggcctgggtgagtccacgggggaccagagatgagtcacggctttggtgggtgttagtcttggtactatcaagtcttcccatgcccagaggagcggggattgttttctccactttatttttatttttattttgagacagagtctcactctgttgcccaggctggagtgcaggggtgtgatctctgctcactgcaagctccacctcctggattcatgccattctcctgcctcagcctcccgagaagctgggactacagccgcccaccaccacgcctggctaattttttgtatttttagtagagacgggatttcaccgtgttagccaggatggtctcgatctcttgacctcgtgatccgcccacctcggcctcccaaagtgctgggattacaggcgtgagccaccactcccggccttttttaaaattttttttctgagacagtctcactttgtcacccaggcgggagtacagtggcgcaatctcagctcacttcaacctctgcctcccaggttcaagcaattctcctgcctcagcctcccaaatagctgggactacaggtgcccaccaccatgcccagctaatttttgtatttttagtagagacggggtttcattcagttggccaggctggtctccttaaatgatccgcctgccttggcctcccaaaattctggggttacaggagtgagccactgcgtccggcccattttctccactttctaaatgaggttaggtgcagccactagccctccggtggttcccagctgcccttgggataacccccaccccttaccctggctcccccatctccacacagcctggctccttgtcacctcttctctgcctcctgtccccgcttcactcagctttggccacaagggactctttttggtccctcctacaaacaaagtgtgttcctaccccaagcctctgcatcagctatttcttccgccttcaccctcttcctcaggtctccatgtggcagctccctcttgacatctagagtcacctatgatgtcaccttccctctaagaggccctccctatctatccgagcagtctcttctgagcacactccactctcccctctctgctgagttttttattgtttttctatttatgtacttatgctcatctgtccactcagctagattgagcacagggtatgggtatttacttctagatccccagcagctagggtactgactggcacatagtaggtgctcaagaaatattgtgaaatgaggccaggcgtgctggctcacgcctgtaatcccagcactttgggaggctgaggtgggtggatcacgaggtcaggagatcgagaccattctggctaacatggtgaaatcccgtctctactaaaaatacacaaaattatccgggcgtggtggtaggcgcccatagtcccaccttcttaggaggctgaggcaggagaatggcatgaacctgggaggcagagcttgcagtgagcagagatcgcactgcactccagcctgggcgacagagtgagactgtctcaaaaaaaaaagaaatattgtgaaatgaatagaaggtcccccagcaactaggacactagctggtgctttaataggactcaaaaaatattaagtgaggccaggctgggaggccaaggcaggcggatcatttgaggtcgggagttcgagaccagcctggccaacatggtgaaaccccatctctactaaaaatataaaaattatccagcagtggtggcgggcagctgtaatcccagctactcaggaggctgaggcagaagaatctcttgaatctgggaggtggaggttgcagtgggctgaggtcgtaccattgtactccagcctgggcgacagagcaagactctgtctaaaaaaaaaaaaaaaatatatatatatatatatatatatatacacgtatatatatgtgtatatatatatacatatatgtgtgtatatatatatatacgtatatatatgtgtatatatatatatatacacgtatatatatgtatatatacacacacacacacacacacacatatatattaagtgaaaagaaggtcccccagcagctggggtactggctggcacatagtaggtgctcaagaaacattgggaaatgaaggaaagatctcccagcagctagggcactggctgatgcttagtaggactcaacaactgttaagtgaagggaatatcacccagcagctagggtacctagcacacagtagataccaaataaatatacacagactgaagaaaagactcgaaagtgatccattgccaacctgaacagagaactctagtctgtctgattctaaaatgagcccaggagctgagacacccccgaaggccagggtggggtttgttccctgcccccactgggggaagagaaggcaggcgggcagtgggactgaggtgcctctgtttccctgcccacctgcctgcccacctgcccacccggaaggatcttccctgacctcagcagcaacgacatgctcctcttcatcgtgaagggcatcaacttgcccacacccccaggtgagggggctgtaggcaagggtcagggtcatggggaccccctctctgcccagctctgaccgttgtttgcccacaggactgtcccctggcgatctggatgtctttgttcggtttgacttcccctatcccaacgtggtacgtggggagctgaggaggggagggctgcagcctcagtgggccaaagccaggtcccaggccccctagatttcctgcctcctctctggtcataggaagaagctcagaaagacaagaccagtgtgatcaagaacacagactcccctggtgagcctcggctggaagcaccctacccctactcccttgcagcagaagggacataagacaatggcctgaccccacccaacttcctctccctccttcctcctgcagagttcaaggagcagttcaaactctgcatcaaccgcagccaccgtggcttccgaagggccatccagaccaagggcatcaagttcgaagtggttcacaaggggtgagctagagagagccatggccgctgggtgggctccaggggaggggagctcctctgaaccaaccatcctgtccccactatacacacatgcacacagggggctgttcaagactgaccgggtgctggggacagcccagctgaagctggatgcactggagatagcatgtgaggtccgggagatccttgaggtgagaggtggacattcatccgcgtgctccggtatggccatgctactcgttaacattattaaaacacttcctgccttgagccctctatgagcctgtctgttgacccagcccctcccctcagagcctcagacctccctactgcccagccctaaatacttgcagtaccccactccattatgatcaactggtatctcagccataccatgggctcatattttagaaaccactcttggccaggcatggtggctcatgcctgtaatcccagcactttgggaggctgaggcgggcagatcacgaggtcaggagatcgagaccatcctggctaacatggtgaaaccctgtttctactaaaatacaaaaaaattagccaggcatggtggcgggcgcctgtagtcccagctactcgggaggctgaggcaggagaatggcgtaagtaaacccaggaggcggagcttgcagtgagcccagattgcaccactgcactccagcctggacaacagagcgagactctatctcagaaaaaaaaaaaaccaaaaaaaaaaaccagtcttgttctcccttgtcctggccctgggcctctagtcacttcctgcttcccaccaacagtttctccttacccccacccaggtcctggatggtcgccggcccacaggggggcgactggaggtaatggtccggattcgggagccactgacagcccagcagttggagacgacgacagagaggtggctggtcattgaccctgtgccggcagctgtgcccacagtgagaccccccacccccacccatcagcaaccccagggagggaagcttggttcaggggcccaggactcacaggactggttctctcctctgaagcaggttgctgggcccaaagggaaggcccctcctgtgcctgcccctgcaagggagtcagggaacaggtaggtatctgggccagggcatgctggagaaaacacccaattcccctctcagccccacctggacagtttcccaccaggcacaaattggaccacgtccctctcctgctgcaaaacctttcttggcaccccttttcccagaggatccagtttaaactccttggtttggtctttaaaaccttttgtgatctgaccattgtcaacatatccaggcttctctctccctactccctcctgtggttcatgtccatgaatagttttcactggcctctggacttctgtgggttccagtgccctgaacacccctacctagggtaggggtgttccttgttcctctgcccacctctgattccttctttggatcccaacttggctgttacctcctccaggaagccctccctgaccactaggcatcatagtttcctgggtgtgcagccatcatccccgctaggttttgggatcagtaacaccgggtggttctcggctgtctcccaccatacccccagtgcccagtgtgtcttttttttttttttttttttttgagacagagtctagctctgtcgcccaggctagagtgcaatggcgcgatctcagctcacagcaacctccgcctctggggttcaagcgattctcctgcctcagcctcctgagtagctgggattacaggcatgcgccaccacacccagctaatttttctatttttagtagagatggggtttctccatgttggtcaggctggtctcgaactcccgacctcaggtgatctgcctgcctcggcctcccaaagtgctgggattacaggcatgagctaccatgctcggcttttttttttttttgagacagaatcttgctctgtcacccaggttggagtgcagtggtgtgatctcggctcattgcaacctccagctcccaggttcaagcaattcttctgcctcagcctcccaagtagctgggactacaggagcacaccaccatgcccagctaattttttttctatttttagtagagacggggtttcaccatattggccaggctggtctcgaactcctgacctcatgatccactcacctccgcctcccaaagtgcagggattacaggcgtgagccactgtgcccagcccagtgtgtcttttgaattaacagggttgggctgggggaatctctgcagtcccttatccttcctccaccccttagatcagcccggcccctgcatagcctcagtgtgctggcgtttgaccaagagcgtctggagcggaaggtgggtatccatcctgccgggctacatggggcaggactggggagtctgcaggcccaggcaggatcctcacaggaccctctgtatcctctagatcctggccctcaggcaggcgcggcggccggtgcccccagaagtggcccagcagtaccaggacatcatgcaacgcagccagtggcagagggcacagctggagcaggggggtgtgggcatccgacggggtaggggtttggagatgggcatctggtgggggaggagctccaggataggcatggggggggaggtgctcagggatgcatatctggtgggggaggggctcggggatgggcatctggagagggaggggctcggggatgggcacctggagggggaggggctcggggatgggcacctggagggggaggggctcggggatgggcatctggagagggaggggctcggggatgggcacctggagggggaggggctcggggatgggcacctggagggggaggggctcggggatgggcacctggagggggaggggctcggggatgggcacctggcgggggacgggcttggggatgggcacagtccaggagggttgtgggcagtgaggccccaccctaagcctccattcccccgccatccattctcagaatacgcagcccagctggagcggcagctgcagttctacacggaggctgcccggcgcctgggcaacgatggcagcagggtgagctggtcgcgggccgggtgggcactgggcagcgggcagggtggggcctgcagggactacctgctgaatgcccatcccccacaggatgctgcaaaggaggcgctctataggcggaatctggtagagagtgaggtaagcagcttaggagatggggtggttgggggatcactgtggtcgtagcccacctccatgaccccagtggcctcctctcccccagctgcagcggctccgcaggtgaggagcccatggggcgggcagcccccagaaagcgggcagcaggccccgataccgggaagagccgacacagccacgaaccagacaagcagacaatcagcggacaatcggttctggactcacccctcatccgggcccccagccccgccagagcctccgtggctgcgggtgttgggaaccatgcctgccagccagtatgtgcccctcacccaggcctggctgggccctggagagtcctgtttgcacagcccaggggtgtccggcctctggcccgccccggagcagggagggtggctggggccaagccccgagggcccctgcaagcactttacttcctgttcctccccagccttaaccccaaagccctcctgcaccccaaagaagccactgaggctggccgagccacactgtctccccaggggcgtcgacctggcccagctgggtccccagggccagcacatggaataaaatagccagggccacactcagcccagctctgtcctgtctgtttcttgctcagaccctcggtggccaggctaggtcttcccacccaccccccggttcccctggaagtggatggggaggcgcctgttagggaagcagttttggggagggacagtgtgcttgtgaaaggtgctttttttttttttttttagagaccgggtttccctctgtcacccaggctgcagcgcagtggcacaatcagctcattgcagcctccgactcctgggctcacatgatcctcctgcctcagcctcctaacggattacagaagggcaccaccacacacccagcttgaaggatgcatttcattcccatgcttgctgtggggggggatacatgtgagggtccctatatctgtcacccagtgttttttcagtgggtggccttgggcgtccctgcaatcacacgtggctaggtcgcacagggtgctgtttggtgaccccagtgtgtgcctcaagacctcaaaattcagtcctgacccacttagcatcccagagcctcagtttccccagctggactggttgtggggaggagtccgtggacagagcccccaaagggtgcctggtccgtgctgagtgctggaagggtttggctttattgttgctgcctccatctgtgttgggagtttggggtagggtgtgtcccgccaggccggcgtggtctgtgagcctggagtatgccagctgtgtgcctctgtgtctcggccagtggcaggcagagcaggcccagccctggaggcccaggagagccagaccaagggcccctggtgggcgttgtctcctcagtccacggcccagcggagtcccaggagtctgagctgctctgctgggcctctctaggatcaggggccccctgcccgtggcccacgtggggtggtgggaggcagccggatcaggacctgctccggattccctgccgtgtccaccacacgcaggtttgggagccccaggaaggcctcagccgcgatgctcgtcatgtgaagcctgttggccctgcacagagaggcggtcatgaccctcccaggccctcccctgcccacctccacccctccggtcaccctcggggcacctgaggaagagggcacgcaggcggggtgtgctgaggaaggcctcggggcccacgtggccgatgcggttgccctcgaggtgcagctcctctagggcctcaggcaggtccgggggcacaaaggacagctcattgtggctgaggtccagcatctgggcagggggttatagatggcatcgtggcagccccaggcctgggccactcagctcagccagcccccaacctctctgagagtcccctgcccccttcataccagcctggcccttctgccccccaccccccatgattgccaaattcctcccttctgcagaggtaaactaaggcccttcccaggaaggcacagacagacaggtccccacttgattaaatgagtcagtcattgaatcgcaccatacctctttcatcactttttttttcaagagacagggtcttgctctgttgcccagtctagagggcagtggcccgatcacggctcattgcagcctcaaacttctgggctcaagcgatcctcctgcctcagcctcctgaatagctgggactacaggcatgtgccaccacgcttggctatgtttttttggtagagatagggtcttgctgtgttgccaggctggtctcaaacccatagcctaaagcgattctcctgccttggctccccaaagtgctgggattacaggcatgagccacctcacccagcctcctcatcaccttctaacccactcttatcattttcttgttctgattgctttaccagctaactagaatgtttgggacgtggcagggcaggcagggggatggaggggccctggggacagtgtggctaaccagcctgtgcctgacctggagggcttggagctcatgccaggtgcctggcccgatgtcgccgacccggagccggttgtgcgccaggctgagctcccgcagttggtccaggccggccagaggctcgggctcgagcatccgcagctggttgcgttgcagctgcagggtgcgcaggccagtgggcaggcccatgggcagccgggttagctgattccctgccaggtcgaggctgcgcagggcacgcaaccggcggaaggcccggtggtgcacacgggcgctggccaggcggttataggccaggttaagctccgtcaggcccggtgtggcgaccaggtcacgggcacccagcgcggccacgtggttgtggggcagcaccagggcacgcaggcggcggggcagggctggaggcacgcggtccagcccattgccatagaggtgcagcgtgtgcaggccccgcagcggccgcagagccccggcgggcagccctgagctccccagctggttgtgctgcagcaacaaatagcgcagaccacgcgccccgtgcagccgagccgcctccacctgccggatgcggttgcggcccaggtgcaggatagccagggtccggggcaggccggcgggcactgtggtcagctggttgtgggagagatccaggtattcaaggctatgcagcttgctggaaggagagagggtcggtgttaggtggggcacttggagtggggtgcctgacagattttggcggggaggctggggagtggtcctgagacagatttaagctggagattttgacttgggagtgatgcgtggagagagctgggtgggaggtaaacttggggtgcccagggcagattccagcctgagagttagctatgggggtgaccagggtagagccgagatggaaaggcatgtgagacttacgatgtcagtgcagggctgtggggaacagggacacctacccagtgctctgccgagcccagtgagcagcaggcactcagtaaatgaggccgtggcttaggagccagtcagggaagggggactgaaggttgggacccccgactgtaaattctcagcccctgctgccccccaaccagcctgtacctgaaggtggtggcatccaggccactgtctgtcagctggttgtgctggaggtagagctcacggagttgagtctggcggctcagggctcctcggggcaccttggagatgagattgttctggagaaggaagaagagaatgagacttgagtctgggatgagggcagcgggaagccacagacggctcttgagtaagggagtgacgaggagcttgccttgagctcaaagcgatttccaataaagtgattcaaagaaggataactctgaccactggcattctgaggggcaattgagaagaatggaaagctaggaactggaggggtccccctggaaagaggtgaagagagtctggcccggggtgggacctacagcagggctacctgcaggtggagccgctcgagtgagggcggcaggctgggcggcaggtagctgagctggttgttggagaggctgagggtggcgatggcctcggagccgcggaaggcgtcggggggcaggccagcgttgctcagctggttgttgtggaggtacacggacctgaggagagccaggctccggccaccagcctgcccctcgcctcctaccaccccactcccgcaccacaccctgctcagggtcgccttcagtgtgtgtgtgtgtgtgtgtgtgtgtgtgcgcgcgcatgtgtggagtctgtgtgggaatgtaattgtgtatgtgtgcatgtgactgtgcgtaggtgtgcaggtgagtgtgcatgtgtgttgtatgaatagacgtgtgtgcatgtgtgagcagtgtgcatgtgtaagtgtaatgagtgcatatgtggagtgtgtgtgcacgtgtgtatgtgattgtaagagtgtgtgggcgtgcatgtgtgtatgtatatgcaagtgtgtgctatgtgcctgtgcataagtgtgcatgggtgagtgtgtgcatgtgattgtaagtgtgggtgtgcatgtgtgcatgcctgtgcataagtgtgcatgtgattgtgtgtgtgcagccgagtgtgcaactgtgtgtatgcatgtatgtccatgtgtgcatgtgatcatgtgcaaaagtgtgagcattgtgtacatatgtgcatgtgtgtgcttgtgtgtgcatgtgattgcgtgtgcatgcatgagtgtgtgcctgtgtgcatgtggttggaagtgtgtgcaggtgtgtatgtgagtctgtgtgtgtgcttgtgtgtgcatgtgattgtgtgtgcatgagcatgtgttcatgtggttgtgtgtgcaggtgtgtatgtgagtctgtgtaagtgtgtgtgtgtgtgtgtccctgcacatactgtctccacctcagtctggagttctgacacagcatacagggccctgtctccccgctcactctcctcccagggtagaactatgccctcttcccactccccaaggctagggatctgtccctggttaagccctccagggcaaggcattttgtttctgtttttgtttttaattttgagacagagtctcactctgtcgcccaggcttgagtgcggtggcacgatttcgtctcactgcaaactccacctcctgggttcaagccagtctcctgcctcagcctcctgagtggcggggattacaggcgcacaccaccacccccagctaatttttgtattttaagtagagacagggtttcatcatgttggccaggctggtctcgaactcctgaccccagatgatcctcccaccttggcctcccaaagtgctaggattacaggagtgagccactgcacccggccgagggcaaggtcttaactccctcattgctcctagaaccggggcatgacacagatgtatctgaggcctgggggcctgggctgggccagggtctacctgagtgccggcttctccccaaaggtgagggggaagatctccatcacttggttggcagccagatccgcgacacggagggaccggggcagaaactgaggggccactgagagctgtggggacacagcccacagccggactggtcctggtgcgccttggccccaccacttccccagcagagctgtcccctccacaccctgggctgagtgactgaagctgcaccctcactgggctcggcctgcgggtggggctgggggctcaccttgttgtgagccacgcagaggtgctgcagctgggtgagggactcgaaggcctcgtcaggcaggcctgggagagtaggggggcagtgaagggaccccaggcctgtcttgggtggagggggagtctgggctcccagctgccccaggactctcggccggggaactggcagaggctccccaggccctcagatcccctcctccccatccctactcaaaagccacagcccccaacccccaccccagctcctgagtttccatcctgctcagcaaagggcagttctgggaactgccacagagctgcccgcagatggggcgggggagggggatggcagctgagacctcggtcagtcctacagccccagagaggccgcctccctctgccccctcaccttcggaggagatgaggttgttgtggaggttgagggttcgcaggccactgaggcgggacagctcattgtaggggagttcctggagctggttgttctgcagggtgagagttggggtgttcacacccgtgaccccgtgaccaagtgaccccaagcactgattctcaacttcccatcagcccaaaccagccccataccatcatcacccccacagttaatcccaaacaccccatcactctgacccagtcttataactgccaagatgtcaaaccccaaacccccacaatcgaccccaaatgtgccatcacccccacaatcgaccccaattcccccaacacccccacaatcaacccaaatgtgccatcacccccacaaccgaccccaaatgcaccatcacccccacaatcgaccccaaattcctcaacacccccacaatcaaccccaaatgtgccatcacccccacaatcacccccaaatgcaccatcacccccacaatcgaccccaaatgccccaacacccccacaatcgaccccaaatgcgccatcacccccgcaatcaaccccacatgccacaacacccccacaatcgaccccaaatgcgccatcacccccgcaatcaaccccacatgccacaacacccccacaatcgaccccaaatgcgccatcacccccgcaatcaaccccacatgccacaacacccccacaatcgaccccaaatgcgccatcacccccgcaatcaaccccacatgccacaacacccccgcaatcgaccccaaatgtgccatcacccccgcaatcaaccccacatgccccaacacccccgcaatcgaccccaaatgtgccatcacccccgcaatcaaccccacatgccccaacacccccgcaatcgaccccaaatgtgccatcacccccgcaatcaaccccacatgccccaacacccccgcaatcgaccccaaatgcgccatcacccccgcaatcgaccccaaatgcgccatcacccccacaatcgaccacaatgcgacatcacccccacaattgaccccaaatgcgccatcacccccacaatcgaccccaaatgtgccatcacccccaccatcaaccccacacgccacaacatccccataaccccaaactccccatcacactaactccaaacaacactataaccgccaagatgttgaccctaacaccactaatcctcagtccccgacaacttccagcatgtccacgctcacccctctcatcttgggcatgcagagccaatctgccaaggcaaagctccatcacagcctgctctgcaccgccctcctgcaagtgtgttcctataccccaccacgctcctcagctctggggcacccctccagctcccctcaccactgggtctcagccctgcatgcccccactcccctccgtgggccccacctgcagggagaggtgctgagcggctctggtgatgttgtccgggaacactcgaaggtccaagccatcacagtccacagtgtcgactcgggggcaggagcagcgcaggggacaggcccggggcaggggctgcaagctctcccccaggtgggggaaggcagcgtcttccaagccggcgacgggcgggggccccggcaacagcaggagcagcagcaggctcggccactgcgggggagggagggtcagcgtgtctccaggctgggcgcagggtcgccatggtgactggagcatcccctcctcggggagggtcttggtggggaggcagtggccagttggcagagcaggggtgggggggcaggcaggccccaccctcagaccctcccgtgccccaccttaccatggccagccctgactctgccatctcgcccaagctgctgaccaggacttcctaatggaaaccaggcggtcacctcctggagcctctgctgtggccaccaccgccccccatctccagacccatgccaccccccacaacagcctgttctcccggggctttgggggagctggcccacccccttccccgccctggggaggacgggcaggcggccggatggggtggtgaggacaggccagcccgtccccttggtcccccccaacaaccaccccatctctgctttcgtaacctcagccagcctgggccgggccacaagaacaaggaatgtttggggaaaagctgagattcgtcctgtctggtatttgggacgaccgcaggagtaggggtggggatggagggatggggggagcttcggggcacaggagagttccgagaagcaggggcgggcagcagcgagggattagggaggcctgagcttagcctggcagcccagatgccagcctgggagctcctgaccaggtctgctgcccggcacccacctcccctctgctggctggtcttgctccagacacccgccccctcctccccccgcaaatggccacagccgcctggaaggaaattacatatatccaggcatcagcctggtggttaagagtgtgagcttggtgccagcctgcctgggtttgaacctgggctgtgccacctctcagggccttggtttccctttctggggtaatggttggctcaccaccccacactcccccacagtgttgtaaggattatacgaagtgtgcattcagaacagtgcctggcatatcccagggctttggcacccgtggatgggggtgacaagctggtctccacatgaggtcaattctcccagacccacaacttaccaacagggcggcttcagacaggtccttctcctgcccagacctcagctttcccacacataaaatgggattgacaggctgggtgctggggtttatacctgtaatcccagtgctttgggaagctgagacaggaggatctctcttttgttttttgagacagagtctcactctgtcactctgtcgcctaggctggagggcagtggcgtgatctcggctcactgcaacctccacctccggggttcaagtgattctcccgcctcagcctcccaagtagctgggattacaggcgcctcccaccatgcccagctaatttttgtatttttagtacagacagggtttcgccaagttggccaggctggtctcgaactcctgacctcaggtgatttgcccaccttggcctcccaaagtgctcggattacaggcatgagccaccacatctggctagaaggatctcttgaggccaggaatttgagaccagactgggcaatatagtgagaccctgtctctaaaaataaatttaaaaaaaaattagcctgggctgggctccatggctcacacctgtaatcccagcactttgggaggcttaggcaggcggatcacctgaggtcaggagttccagagcatcgagcccaacatggtgaaatcctgtctactaaaaatacaaaaattagctgggcatgatggcacgtgcctgtaatcccagctactccagaggctgaggcacgagaatcgcttgaacctgggaagtggagatcacatcactgcactccagcctgggcaacagagcaaaactctgtttcaataataataataataataataactaacctggtatggtggtgcacacccacagtcccaggtactcaggaggccaaggcaggaggaacacttgagcctctgggctcaagtttgaggttacaatgagctatgtgccactgcacgccactctgggcaacagaataaaaccctgttattaaataaagaaaaaaaaagtggggggatgacaaaccccccccctcaaagagctgtcttgaagcagaacgaggcagtgggtagaacattttaagaatggtggctgggtgtggtggctcatgcctgtaatcccaacacttttggaggctgaggcaggaggatggctctaagcccaggagtttgagaccagcctggtcaataatggtgagacccccgtctctaaaaaaattttttaaaaactttgtggggggccaggcgcggtggctcacacctgtaatcccagcactttgggaggccgaggcaggtggatcacaaggtcaagagatcgagaccatcctggctaacactgtgaaaccccatctctactaaaaatacaaaaaattagctgggtgtggtggtgcgcgcctgtagtcccagctactcaggagcctgaggcaggagaatcactagaaccagggaggcggaggttgcagtgagccgagatcacgccactgtactccagcctgggtgacagagcaagactccgtctcaaaaaaaaaaaaaaaaaaaaacttagcgggggccaggcgcggtagctcacacctgtaatcccagcactttgggaggccgaggtgggcagatcagctgaggtcaggagttcgagaccagcctggccaacatggcgaaaccctgtctctactaaaaaatacaaaaattagctgggtgtggtggcatgtgcctgtaatcccagctacttgggaggctgaggcaggaaaatggcttgaacttgggaggcagaggttgcagtgagcagagattgtgctactgcactccagtctgggctatggtgcgagactctgtctcaaacaaaacaaaacttagcggggcatggtggtgttgcctgtagtcccagctaccagggaggctgaagtgggaggatcacatgaacccaggaggttgaagctgcagtgagccgtgttcatgctactgtacaccagcctggatgacagagtgagaccctgtctcaaaaatgaatgaataaataaaaataaaagtatagtgtcggccaaggacggtggctcacacctgtaatcccagcactttgggaggccaaggcaggtggatcacctgaggtcaggagtttgaaaccaacctggccaacatggtgaaacccagtctctactaaaaatacaaaaatttcctgggcacggtggtgcatgcctgtaatcccagctactcaggaggctaatgcaggagaattgcttgaacctgagagctggaggctgcagtgagccgagatcacaccactgcactccaggctgggtaacagtgagactccgtctcaaaaaaaaaaaaaaaaaaaaagtatagcgtctgctcagcttgggagtggccaaggccaggagttggagtctcccagaagcagagcttgagacaaggattgagtgcatttattccagagaaggcaggcagtgatacaggggagggaggaagtgatcaagaaacagtggctgggcgcagtggcccacgcctgtaattccagcactttgggaggctgaggtgggcagatcacctaaggtcaggagttcgagaccatcctggccaacaaggtgaaaccccgtctctactaaaaatacaaaaaaattagccaggcatggtggcaggcacctataatcccagctacttgggaggctgaggcaggagaatttcttgaacctgggaggtggaggttgcagtgagccgagattgcatcactgcactccagcctgggcgacagtgcaagactccatctcaaagaaaaaaaagttaagaaacatgggccaagagaggtggttatctgttcatgtttcctagggctgtgtgacctcctgagggtctctcttcatggggtgagacaggagacgggtcttagtttaggccagaagagaacaacagctcctatctcaagtactccccatgggatggatggccattagcttggacattgggtggaagttcctcagtctcttcagcagtgtaatggggctaaccctagggagacaggactactgtagcagtcctagcccccagggaagcagcaataagaaccaagatgtttgagttccgggcaagcctctttccattgcaaaggaaggagaacccaaactgaactagctaatacaaacaagggcatttactggctcatgaacagaaaacctgtatccttcaggcacagctggatccaggggctccagtgatctcttctagatgaattctctcttgaactctgaactctacttgcaggcttctgtatgtggtgctaagacattcccagaaccaataagcattcttccctggctttagtagaaagcctcagacttaaatctcattggcctaaatttggtcacatgtccatccagagccaatccctggggccagagggatggaatgtgctgattggctaggaacctaaccattgttcctgtaaataacccactggccttatcttcctgcaacaaactccccttctgccacactgtcctgtccagtcctgcctggtcctgcccagttctgcattacccagcaggggcctctgcagggataacaatggagtatggtccatcaatgtggccccagtgtccagcatggagcctggtataatcagtatttagtaaatatttacagaatgcacataggattggctgtgcgcccctgtggctcacacctgtaatcccagcactttgggaggcagagacgggcagatcatgtgaggttgggagtttgagaccagcctggccaacatggtgaaaccccatgtctactaaaaaatacaaaaaaaaacaacaaaaaaaattagctgtgtatggtggtgcacacctgtaatcccagctactcaggaggctgaggcaggagaatcgcttgagctcaggaggcacaggttgcagtgagccgcgatcacaccactgcactccagcctgggtgacagagcaagactctctctaaaaaaagacagaaagggccaggcacggtgtctcatgctgtaatcccagcactttgggaggctgaggcaggcggatcacctgaggtcgggagtttgagaccagcctgacaaacatggataaaccccgtctctactaaaaatacaaaattagccaggcatggtggcacatgcctgtaatcccagctactcaggaggctgaggcagaagaatcacttgaacctgggaggcagaagttgtggtgagctgagatcgcgccattgcactccagcctgggcaacgagagtgaaactccaaaaaaaaaaagaagaaaaaagaaagaaagaaaaggaatgcattcacagttctggaggctggaagtggttccaggcaacttggtgtttcctggcttgtggctgcatcaccctaatctctgcctcagtttccacgtggccttcttcactgagcctgtttctcctctcctgtctttatttatttatttttgagatggagtctcgctctgttgctcaggctggagtgcagtggtgtgatcttgattcactgcaagctctgcctcctgggttcaggccattctcctgcctcagcctcccaattagctgggactaaaggtgcatgccaccacgcccggctaatttttttgtgtttttagtagagacggtgtttcatcatgttagccaggatggtttcgatctcctgacctcatgatccacctgcctcagcctcccaaagtgctgggattacaggcgtgagccaccgcgcccagcctctcctctcctgtcttttataaagacactggtctttggattcagggtccactcagttaatctgggataatctcatctcaagatccttaactgaattacatcgcaaagacctgttttccaaatcaggtcacattcacggcatcggggagacaggacatctacctatctatttgagggacaccattcaaaccacgacatggatttacctgggtagagataatcttgtgggaaaaaaaattgcagaatgatgctaacaatgtagatcatttccatatattaaaacatacatattggctagctctggggggagacctgaatgcttgtggctgggggcaaagagaggcttgccactggatatccttgtacatctgtttttgttttgttttatttattaaattaattaattaattaatttttttgacagagtctcgctctgtcacccaggctggagtgcagtggcgcaatctcggcggctcactgcaagctccgcctcccgggttcacaccttctcctgcctcagcctcccgggtagctgggactacaggcacccgccaccatgcctggctaaatttttttgtatttttagtagagacagggtttcaccgtgttagccaggatggtcttgatctcctgacctcatgatctgcctgccttggcctcccaaagtgctgggattacaggcgtgagccaccacacctggccctatttgtttattttgagacaaagtctctctgttgcccaggctggagtgcagtggcgggatctttgcttactgcagcctccgatccctgggttcaagcgattctcgtgtctcagcctcccgagtagctgggactacaggtgcaggccatgatgcctggctaatttttgtatttttaatagagacaggttttgccaagttggccaggctggtttcaaactcctgacctcaatgatccgcccgccttggccttccaaagtactggattacagatgtgagccactactcctggcctgtttggggttttttttttgtttgttttggggtttttttgagagggagtctcactctgtcacccaggctggagtccagtggcacgatctcggctcactgcgacctctgcctcctgggttcaagcaattcttctgtctcagtcttcccagtagctaagactacaggtgtacaccaccatgcttggctaatttttgtatttttattacagacaggattttaccatattggtcaggctggtcttgaactcctgatctcaggtgatccacccaccttggcctcccaaagggctgaggttacaggcatgagccaccacactcggcctgttttattttgttttttaagagacaggagctcgctatgtttcccagtctgaactccaactcccaggctcaagcaatactcctgaatagttggggccatgggcatgcaccactgtgccctgtacatctgttgaattaaatagcaaaaaagttgagcagggtgcagtggctcacacctgtaatcctagctactcaggagcctgaggcaggaggaacacttgaggacaagagttcaaaaccagcctgggcaacatagtgagaccctcatctctaaaaaaaaaaaaaattcagaaaattaggttgggcaaggtggctcacggttgtaatcccagcactttgggaggtggaggtggaaggattgcatgagcccgggagttcaagaccagcctgagaaacaaagtgagaccctgtctctacaatttttttttttgaaatggagtctcactctgctgcccaggctggagtgcagtggcatgatctcggctcactgcaacctctatcccccgagttcaagtgattctcctgcctcagcctcctgagtagttggaattacaggtgcctgccactgcgcccagctaatttttgtatttttagtagagacacggtttcaccatcttggccaagctggtcttgaactcctcaccttgtgatccacccacctcagcctcccaaagtgttgggattacaggcgtaagccactgcacctggtgttgtagaggcaggagaatcgcttgaacctgggaggcagaggttgcagtaagccgagatcacaccattgcactccagcctgggcgacagagcgagactccattaaaaaaaaaaaaacaaactttttaattagctgggcacagtggtgcatgcgtgtagttccagctccttgggaggctgaagtgggaagactgcttgagcctgggtggagtgccactgcactccaacttgggcaacagagcaagaccctgtttctaaaaaagaaaagaaaggaaatggtggatacacactgctaacttcaagggaggatgagaaacaccatctttctactgggaagccacatgttcagataaaaatggagtttcttggctgggtacagtggctcatgcctgtaatcctagcactttgggaggccgaggtgggcggatcacgaggtaaggagtttgagaccagcctggccaacatgatgaaacccgtctctactaaaaatacaaaaattagccagacgtggtggtgggtacccgtaatcccagcttacttgggaggctgaggcaggagaattgcttgaacctgggaggcagaggttgcagtgagccaagatcgagccattacactccagcctgggtgacagagcaaaactctgtcttggaaaaaaaaaaaaattgagtttctatcactactgcataaaagtgggatgacctgtaaaaaggaagcaatgaggagttaggaccacaaggaaaattgagcccaaggctttctgtgttcaaagccactggtctccaaagttgggtgtgggaaatgaatcataatttctagttctatttacctgccccatcctgttttatggcccttttccaggtatgatttaattcacaggctagaaagagtggtctaaatgcacctgtatagttgggttatttgtaaacaaatacatatacgtattaagggagagtccaagtgacgaacgatcagaaatatgggaaatcttggctaggtgcagtggctcacgcctgtaattccagcactttgggaggccgaggtgggcggatcacgaggtcaggagatcaagaccatcctggctaacatggtgaaaccccttctctactaaaaacacaaaaattagctggccgtggtggtacgcacttgtagtcccagctactcgggaggctgaggtgggagaattgcgtgaggctgggaggtcgaggctacagtgagctatgatcacaccactgcactccagcctgtctcaaaaaaaaaaaaacacaaaaaaacaaaaaaaaaacaccataaaaacacctttataataattgttgtaggcggaggtttcagtgagccaagattgcaccactgcactctagcctgggtgaaagagcaagactccatctcagaaaaaaaaaaaaaaaaaaaaaaaaaaaaggctggccatggtggctcatgcctgtaatcccagcactttaggaggccaaggcaggtggatcacctgaggccaggagctcaagaccagcctggtcaacatggcgaaaccccgtctctactgaaaatacaaaaattagctgggcctggtggtgcatgcctgtaatgccagctatttgggaggctgacgcaggagaatcacttgaacccgggagacggaggttgcagtgagctgagatcgcaccattgcactccagcctgggtgacaagagcaaaactccacctcaaaaaaaaaaagaaaaaaaaaagaattgaggtaaattgcaggacatcatgttggtgtccaccaagaattggggaattacttgatttgggagaagctgccccatcatctggtgtcagaagcgaaggattgagagtgatgtgatatagaaggaaaaacagtctgtttgtcccatgtacgtattcaactgacttgggccaaactgacttctccctagtcttcctcatatcaaaaaatggcactaacattttgctaaatattccactcagatgctaaagtcatcattaacttctctctccttgcccctatcccaatatcttgtccttgaaaatgaccccatcggctctgactatggccacttttctccattttctttctttatttttattattatttctgagacagcgtctcattctgttgcccaggctgaagtgcagtggtgcgatcatggctcacttgcagccttgaactcctgggctcaagcgatcctctcacctcagcctcccaagtagctgggagtacaggctcaggccctcatgctaatttctaaaatttttatagagatgggatctcactatgttgcccaggttggtctccggggatcaagggagactttaagcaatcctcccactcaagccatctcctgccttggtcttccaaagcactgagattacaggcgtgagccaccacggccaatattctccattttcttttcttttcttttctttttttttttttgagacggagtcttgatcagtcgcccaggttggagtgcagtggcgcaatctcggctcactgcaagctctctgcctcccaggttcatgccattctcctgcctcagcctcctgagtagctgggactacaggcgcccgccaccacgcccggctaatttttttttttttttttgtatttttagtagagacggggtttcaccatgtttagccaggatggtctcgatctcctgacctcctgatccacctgcctcagcctcccaaagtactgggattacaggtgtgagccaccatgcccggccgtattctccattttcaatgctagtagattaatctaagtcagcatcacctaccctcctggctcccccaagactattcctgcccccatcctcatcccccaagaccattctgcacatagcagtcataataacatcctcctggccgggtgtggtggctcacgcctgtaatcccagcgctttgggaagccaaggtgggaggatcacgaggtcaggagatcaagaccatcctgaccgtcctggctaacatggtgaaaccctgcctctacaaaaaaaaaaaaaaaaaaaaaaagccaggcatggtggcaggcgcctgtagtcccagctacttgggaggctgaggcaggagaatcacttgaacctgggaggaggttgcagtgagccaagatggtgccacagtcctccagcctgggtgacagagtgagactctgtctcagaaaaaaaaaaaaaaatcctcccccatgctcttttaaaaacttagagtttatttatgtgtttatttattgacacagagtcacgctctgtgtcactgaaacctctgcctcccgggttcaagcgattctcatgcctcagcctcctgagtagctgggatcataggagcccaccatcaagcccagctaatttttgtatttttagtagagacagcatttcaccatgttgaccaggcttgtcttgaacccctgtcctcaagtgatccgcccgccttggcctccccaagtgttgggattacagatgtgagccaccgtgcctggcccctttgaattttgaaacaacattattttatttttgttatttgtaattttattattattattattaaagacagggtcttgctctgtcacccaggctggaatgtagtgacgccatcacagctcactgtaatttcaaactcctgggcacaagggatcctcccgactcagcctcccacgtacataggactacagacgtgctaccacacaccagactaatgaaaaaaaaatgttttttcattgtagagacgaggtcttaacagttgccgaggctggtcaaattcttctcaagccatcttcctgtctcagcctcccaaaatgctgggattacaggtgtgagccactgtgcccagcctgaaattagacattttcagatctgcaaagaaggtacagagagttcttttattcccttcactcaatttcctctaatgttttttgggttttgggttttgggttttgttttgagacaggatctcactctgtcgcccaggctggagcgcagtggctcaatctccgctcactgtagcctccagggctcgggtgatcctcccacctcagcctcttacgtagctgggactgtaggttcacgccaccacactccgctaaattatttatttattttttttttgagagtcttgctctgtcacccaggctgcagtgcagtggcgtgatctcgactcactgaaacctccacctcccaggttcaagtgattctcctgcctcagcctcccgagaagctggactacaggcgtgtgccacctgagattacaggcccggctaattttctgtatttttagtagagacggggtttcactgtgttagccaggatggtctcagtctcatgaccttgtgatctgcccacctcagcctcccaaagtgctgggattacagtcgtgatccaccatgcctggccttgttttgttttttatttgagacaaggtctcgctctgtctcccaggctggagtgcagtggcaccatcatagctccctgcagccttgacctcctgggctcaagtaatctttctgcctcagcctcccgagtggctgaaactataggcgtgtgccagtagagtcagtgaatttctttgatgttttgtagagatgagggtttcgccatgttgcccaggctggtcttgatctcgtgggttcaagtgatcctccctcctctgcttcccaaagtgctgggcttacaggcatgagccaccgcacctggcctggtcatgtattttgagaaccttcttcaatctgggataaatgtctgatgttgtctaatggttagattgaggttctaggtttggggataatatcagacagttacaaatgtcctccctatcacatagctggggtccgtgatgtcagtatgacttatcactggtgatgttgattttgatcacttggttaaggcagtagctgccaggtgtccccactgtcttggagacagctttgctctccatggacgtagggtatgcaagaagcaggggaacctttggctaaagatacattgtgatggccgggcgcagtggctcacgcctgtaatctcagcactttgggagggtgaggtgggtggatcacttgaggtcaggagtttgagaccagcctagccaacatagtgaaaccctgtctctactaaaaatacaaagattagccgggcatggtggcacatgcctgtaatcccagctacttgggaggctgaggcaggagaatcgtttgcttgaacccgggaggtgaagggtgcagtgagttgagattgtgccattgcactccagcctgggcaacaagagcaaaactccatctcaaaaaaaaaaaaaaaaaaaaagatatgttgtgatattgtgttgtgatatatttttaaaaaaccatattttggtcttaggttttctagtacataactcctaaaacccttgaaatcagctgggcacagtggtttatgcctgtaatcccagcactttgggaggccaagacgggatgatcccttgaggtcaggagttttcgagcagcctgggcaacatagtgagaccccatctctacaaaaaaaatttttttaatgaagacaataaaaaaaaactatcttctagattgttcagaggattaaatgggctggccaggggtgggggctcacacctgtcctcccaacactttgggaagcagaggtgggaggatcacttgagcccaggtgttggagaccagcctggacaacttggtgaaactccgtccctacaaaaaatacaaaaaattaggccgggcgcggtggcttatgcccgtaattccagcactttgggaggcctaggcgggcggatcacctgaggtcaggagttcgcaaccagcctggccaacatagtgaaacctcgtctctactaaaaatacaaaaaattaggcaggcgtggtggcgcacgcctgtagtcctagctacatgagaggctgaggtgagaggatcatctgagcccggggtcgaggctgcagtgaaccgtgatcacgccactgcactccagcctgggtgacaaagtgagactctgtctaaaaaaataaaataaatgaggtaatgtatacgaatatgatgcacggagcggaccttcaacaattatttttattgctatgatctgcataattggcacaacagggccctgccacatcgaactgtttaagctcagaaccgtgtctgtcacatgtggagcgatccatgattgatgctatcattatcaccaccatcatcccaccaacccgcccatcggaaacaagctttcatcgaatcccatcgttttttccttttttgtaaatctctttcctcggcctggctctgccgcccaagtatgctcgtcaggcctttgcccacctggaccgggcgcgggcagcccggggctgaggattctcgagccttggtggaccacaggctcccgtcgccccgcccaagggcctggaccgcctgtggtctccatggaaacccgccagccacagggggcgtgacgccgttgagacagacagagatattcacctatcagatcaaagttatctgggcagggcgaacaaacgggacctccgagtggtacgtccttaaggcggggcgggaatacggcaacgggccgcgggggctgttactgtcgctaccaatcaagagtcgagatggctttgatggacaggcatagcgcgagtgcgggctttcgcccaaccggcgggccgctgtcccgaaaaaggaccaatgaggaggcggcaggggtggggcgaaggggccggttgctccggaagtggagggagggggtgaaaatggcgcccagctcgaaatcggagcggaacagcggggctgggagcggcggcggcggccccgggggagccggagggaagcgggcagcagggcggcggcgggagcacgtcctcaagcagctggagcgggtcaaggtgaggcctggagccggagtggggagcgcgccggagggtggggagtagggacgagggaggcggagggaggagggcgttcgcggggtgaggggttgggggcggggccccaggggagggggctcggatgcagggcctgggcggggcccgggggagatggcttggatggagggggctcagttgggggcctggatgcaggtggttgtgtcgggtgaccggcaaaggggctgggatggagggggttgggggcggggccccagggagggggctcggagggaggcgaccccagaggccgcagggagaatcaggaggaagggggcgatccaggcttttcaaagctctgctcccatggttgctccataatggaaccttcccgccccctttgcagagcccctgccgctggctttgggcttcctccgcctgatgttcctctccctgcccaagccccgaccacacatgagctgggagttccagtacctgggtgggcctccccattgaaagtgtgggagctccctggatagggctgagtcttcccccgcagagtgagagttaccgaagcaggctctgtctcctccatcagactggaaactcccagagctgggggatgatgtctctctcccccatcagtttgggagctctggagggcagaaatgtggatctcttgcaggtgggcagtaactggggcaaggctgtgtctctgtggacagggactgcgccttctccgtgaggctggtagctttgtaagggcagtgctgtgtctcccccttttgactgggagctccctgggctgggacagtctccgcccttagcctgggagctccctgggcttggctgtggttccgcccttagcttggaagctccttgggcagggactgtgtctcccctgtcggcctgggcctggctggccaggctgtttcctccgtcagactgagacctccatgtggacagggctgtctcccatcagacagggagcttcccagacaggactcttcccatcagattggaatgtcttgaaggcagagttgggtagcaagactgaggctgttcggatatccctgtgcctggcttctgcctgtcagtccccgcagatccttccgcggtgaagttttggggatgagggattcccttggattccgttggaaggcggtagttaattgggaagggggcgttgggtcattggttaggctcacccttctatctgcctcgactggcccccagcagaggccagagctgccccggggaggaggagcccccttgtttgaaggctggtgggttgggaacagatgggtgcaggtcaggactctgtcccagcctccttagtaggataaatacccacagcttagggacagccttcagggagggaagcaggtggcccagcgtgggacagggtgattggggaactttcttgggggcggtgacgctgggctcagtcaagagggacctgaggctgaagaggtatggaactgggaaggtggcctgggtccctggtggagatgaaggctcaagcgcggtccatctggctttactgtccccatctgcctcagttgttcccaccttccagagcttggccttcttttgaccattatggtgggctgggccggtctggacccggtgagagccgctctgcctctctgccgtgggtgagggggctgggggctgcagatggtgcctgaagtgccctggccaccccttccccagatcagcggacagctctcccctcgcctcttccggaagctgcctccccgggtgtgcgtgtccctcaagaacattgtggatgaggacttcctctatgcagggtgaggctgggcccaggcaaagggggcaggtgggcgggagtggtgggctcgccctgacctggccgctgtgccccctccacccccacagacatatcttcctgggcttttccaaatgcggccgctacgtcctctcctacaccagcagcagtggggatgacgacttctccttctacatctaccatctgtactggtgggagttcaacgttcacagcaagctcaagctggtagggaggcttcaacaccaggctggcccttcagatggtgtggttcagcaggtcacagcaacctctgagcctcaggttccttgggtgtaaaatgatcatcatgtactcctggggtcatcatcaagattccatgtgttagatccaaccatatgaaattaccagggcctggcatggtagctcacacctgtaatcccagcactttgggaggccaaggcgggaggatcacttggtccgagtagttcaagaccaggctgggcaacatggcaaaaccctgtctctactaaaaataaaaaaaaattagctgggcatattggcgtgtgcctgtagtcagctcctctggaggctgaggcaggaggatcacctgagcccaagagtttgaggctgcagtgagccatgatcacaccattgcactccagcctgggcaacagagtgagaccctgtctctaaaacaaaacaaaacaaaacaaaacaaatgaaggctggccacagtggctcacgcctgtaatcccagcactttgggagcccgaggtgggtggatcacctgaggtcaggagttcaagaccagcctggccaacatggtgaaaccccatctctactaaaaatacaaaattagccgggcatggtggcacatgtctgtaatcccagctattccggaggctgaggcaggagaatcgcttagaacctgcgaggtggaggttgcagtgagccgagatcgaaccactgcactccagtctacagagcaagactctgtctcaaaaaagaaaaagaaattaccatttttatggttcaaaatgggtaaatagcagcaattccatttggttcaacacaccctatgaagctgtagaacatgttggctcaggccagttagctttattaggaccaggccaccctggctttagccttgacccttgactcctggaacccccccaggaggtgtgctgttacctcagcatacatgtgaactcagagagctgaacgggcttcagggtaggctgggcttggaaccagtgcctggcgcagtctcccccgggacattgttcccatcggctgcatcccaccctggcctggtctccccgactggtgaaaggagcctccacggctgtcctcaggcaaggtggaggggtgtggcgggtgctgttggggtgctcctacccgctcagccccagccctgatgagggactgcatcgtacagcttcgggggacctccgcagtttccctgacccggtgctgcccctgaacgtgcctcacaggtccggcaggttcggctattccaggacgaggagatctacagcgacctgtacctgaccgtatgcgagtggcccagcgacgcctccaaggtcatcgtcttcggcttcaagtgagaccaggcgcctgggggagccttggctggttggggcagggggtgtgcagtgggggccccccaggcgccgaccaggcagctgagggtatgctggcccccagcacccgctcggccaacgggatgctcatgaacatgatgatgatgagtgacgagaaccaccgtgacatctacgtcagcaccgtggccgtgccaccgccaggccgctgtgctgcttgccaggatgccagccgagcccacccaggtgagggggccgagggggcgagggcctcttcccccctcccccccttgctccgggccgagagtgagctgctgtggcgtgtgttgctacaggagacccgaatgcacagtgcctacggcatggcttcatgctgcacaccaagtaccaggtggtctaccccttccccaccttccagcccgccttccagctcaagaaggaccaggtggtgctgctcaacaccagctactccctggtggcctgcgccgtctccgtccactcggcaggtaggccctgcggtctcgtggccacccggcaacgcgtgaagcgggtcctctccctaccccaccacacagacaaggggccccaggcgtagagaggtgggagctacttccccaagtcacacagcctggttgtgggaatgctgcggtccaaatgtggccacgcccaccacagccctgcccacgggatctttccagtggctgagatgtcccaccatggctgcctccagcagccacttggaatgtggctcatgtgactgaggaactgagcttgtgatacttttttttccactggagtccagtggtgcgatcttggctcactgcaacctcccaggctcaagcaattctcctgcctcagcctcccgagaagctgggactacaggcctgtgccatcatacccagctaatttttgtgtttttagtagagatgggatttcaccatgttgatcaggttggtctcaaactcctgacctcaagtgatccactcaccttggcctcccaaagtgttgggatgacaggcgtgagccaccgcgtctggcctgtgatggatttaattgtagttgttttaagctgaaatagctacagttggctagctggacggggtagcgcccctttctcttaagaagagaaacgctaatgtgacatttcagggtgtggttagtgggcaggcacttggcattatatgtttgatatcggaaagatgccagtgagaatcacaagatgtcccttgacagtgacaaatgtcaggaggctggatcatgccaccggctggcagcaacaggagggagggggccccgggggccatttggcaacagaattgtgactatgactgacccagctgccctgtgcccgggtctctccctctggcagagtctcactgggtccgtatgtccaagactgctgagggggagttgggggccacctgaagaaccctccctggggattggggagcgacttaggaggtggcgaggggttgggggcatctgtggaacaccaatgaaggcccctgtgtgtgcatccatggagcatgtgtcagatgcgtgcacatgtgggtgaaacacaaggaatctataactggaaccacttaatataaattaaaaagacgatttaggccaggcacagtggctcatgcctgtaatcccagcactttgggaggctgaggcaggcggatcacatgagatcagggagttcaagaccagtgtggccaacacggtgaaaccccatctctagtaaaaatataagaattagctgggcatggtggcacatgcttataattccagctactcaggagactgagggaggcggaggttgcagtgagccgagattgtgccaatgtactccagcctgggagacagcaagactccatctccaaaaaaaaaagacgttttaattttgcaagaactcagatgcaaagacgtccattaaatcctcatggaaatggttgtccctggggcggtcggggaatgggcaggattaaatgtatataacgcagcccacaaataagccaggggccagggcactctgtccccagacatatctggggctttctgtcctcacccccaatctataccaggaagggtgaggcgctgtctcttgctgaggcttgaccacttggtttttggccatgaaccccccagcttgcgagggttgacgccgctctgcccttttggctgtgggtcctgttaggaacgaccacagcggactatcagctctgtaccagcccagggaaagggcgtggtcatcagtgggagctgccgacacagaggggtgctttcttccttggccattgtcaccttctgttccccgccctgttgtgggagggctgtcacggtggtggaggggagcccgtactcgatttttctcagatgtgaccttgggcatgtttatccctgagctgcattctgggggatgtggcccctctctaggggttgcttgtagggggcttggaggaaacctgggttggggcccagccacagggttgcttagtgaatatgttggggttctccatgtgttccccacattccttgggggagtcgtctctaggcaggcagagacagaggccctgattcgatgaagtgtgcccgcagtggtctggcttgtgtcaggaaggaccgagggctttgccttaggtcttccatatcagagaaacgccagtgaaaatcacaagatgtccctcgacagagtggcagatgttaggaggctggatgctactgtagtgaacactctacgctgtagagtgttgtctccctcagggcagggttctgtctgtctggttcactcctgtgtcctcagtgtggggcgctcagtagacagcttaagaaaggggtttgaatgaacgtctgcacgcatgaatgcgtggtgtgcatgcgcagaaaggtctttccccttttgggtgtttcaaactgatctcagcatagccaagtctcctagaagtgtctccttaaggtgggtttctgaaaacccctggggacactgagcgaggctgggagcaccccagactgacacttctccacccccatctcttcttaggtgacaggagtttctgccaaatcctgtatgaccacagcacctgccccctggcgcctgccagcccccctgagccccagagcccagagctgccccctgccctccccagcttctgccctgaggcggccccagcccgttcttctgggtctcctgagccctcgcccgccattgccaaagccaaggagtttgtggctgacatcttccgccgggccaaagaggccaagggcggggtccctgaggaagcccggcctgccctgtgcccaggaccctctggcagccgctgccgtgcgcactctgagcccctagccctgtgtggagagacggcaccccgggacagcccccctgcctcggaggcacctgcctccgagcctggctatgtcaactacaccaagctgtactatgtgctggagtccggagaggggacggagccggaggatggtgagcggggggcaggcatgtgacagggcctgggatggagaggccagcccagacggggcccctggcctccctccaccccacccccacttcctgcctccccagagttggaggacgacaagatctccctgcccttcgtggtgactgatcttcgtggccgcaacctgcggcccatgcgggagcggactgctgtccaggtgggtgtgggcagtgggcgggccaaggacagtcccggggagctgccggggggcagttggcaccgtcccctgcgcctacccactcacccgcagggccagtacctgacagtggagcagctcacactagacttcgaatatgttatcaatgaggtcatccgccacgacgctacctggggccatcagttctgttctttcagcgactatgacatcgtcattctggaggtgggcccagggcgggcagggtgggcccagggcctcctgtactctggggtcgccctcaacagttggcatcatccacccccacccccaggtctgcccagaaaccaaccaggtcctcatcaacattggcctgctgctcctggccttcccgtcccccactgaggagggccagctccggtgagcgcggggatcctgccctctctgtccactaggggggccactggcagacacttcacggtgggggtgtggggacgtgagaaggctctccctgtgccacaacctggctgggcccctccatagctgttccaaagacaaaaggccctcagggtagcctggggcctggttcaggagcccggctgtcccagcgtttgtcctatgtccctctccactgtagaccaaagacctatcacaccagcctcaaggtggcatgggacctcaacacagggatcttcgagacagtcagtgtaggcgacctgactgaggtcaaagggcagaccaggtgaggcagggctggggggcagggtcagggcgcggccaaggcgacgagagccactcaccccctggccccgcagcggcagtgtctggagctcctaccgcaagagctgcgtggacatggtcatgaagtggctggtgccggagagcagcggccgctacgtcaacaggatgaccaatgaggcgctgcacaaaggtggggctcggtgaccccgtgatggtcagggtcaccaggaacacttgtcctcacccaggagctgattcctgagcgctgatgaaatgggtgggaaggctggtgaggagagggcagcccaggccaggcccagctcagcagccctgaaagtgtggggcctgggagcctcccaccagtcatggcctggctggtcactcattcacgctacatttattgggtagctgcaggctagaggtggagggcaactcagcagggtccctgccttctggaaccttctgggccagaagcaagtcaggtggagggtgtggccgcagggccaggcaggcaggggctctatgctttgtctccacctgtccctgtagggtgctccctgaaggttctggcggacagcgagcgatatacgtggatcgtgctgtgagggccaggccgccccggacactgactccaactacctccgtggcctgggaccggcccccttcctggggtggcctcttcctggccggctggcccaccgactgatgaccggcactagtgttagcctgcggaacggggctgggcagggcagcctctgttggcctgagggtctggacgctttttatttatgcctatttaagttgggaaggggcagagagagggcgccccctgccccaccagcctgagtgccccgccttcaccccgagctgggcatgggcctggcccctcgtgcatttgcccttttctcggctacagctgtggacgttgccctcggggaggtcgaatggaccccattccccctgccctgcccgcccccagcctccccacccaggccggcaacctggccatccccattccgttcttcttcatgtaataaatgttttaatttctgaacctcattgaggtcctgtcactgcagcttggggcccagctggagcccccgccccaaggcccccaccaaggcccggcgagtcagcagtaggcaaatatcacagcggaatttattgttttaagaaagactacaaaaaggtagaaaacagctcggcacactagactaccacacgtgtggacactttcaccaccgggagagggagccccgtgggcacggggactgggcagggccgccccaaaagctatagcacgcggagcacacaaaatagtgatttttatacaataggtcagatttccatttttttttcctttttcttgccataaacatctatctcacaggctgaaaacactgagaaaactggaacagataaggccatgatggttggaaaaaaacccaacaagttaccaactccgctcgggcggcgctcacgaatcgcacaatagtcatggggtgggggtcgcacggcacggaggagaagcgtggtctccgggaagataggggcacagaaaaggttccattacaaaccagcggcggagggcgggggcgcgggggctggggtctgtgggcactccccggctccgcggctcgctgctctttggaagctggaggccgtgccccctgccgccctcctcacagccgggccgggcagtgcccccttcttgagcttgggggcaagggagggcccagcgctggagaagatgcgacacccacggctttaattgcacttaataccaagaaggggaagcagtggggttgctgggggtagggtgtcccggggctgctgctgacagtggggagtccccaggtgacgcccacctgcgccggcccggggctcagggctgggcccaggacaggctgtgcaaagccagcgagctgaataagttaacagtttcgcacgggagggggcctgcctgcctgccccctggggtggtgggaggacggggctggggagaagacgctggggcctgggaggggggcggccaaggggccgagctggatgccccgcggggcacctgggcacgcggcgggttccttaaggcacgtcttttgtgtcagagtttgcagctgcggctccgcccagcccactgattgtgccggccccataagggaggagggccccggtcttccctgtctcggagtccccctccctgccctggctgaggctggagcagtgaccacgaagccacagaagctttgagggaccctggcgtggaggggtggcgggggcgggtggggcggggaggccaagggcttagctggagggcagcgcctgcacgaagaggccgcgcgcgtcagtccgcgccagcttggccggcggctccagggtctccgggcccagcgcgggtgactcgccgccagccgccagtgagatgtcctgcggcagctcgtcctcgctctcctcctcctcttcttcctcctcgtctggaacacagggaccaagtccggctcggggcggggtggcaacgcccccgggctcctcctcctcccgagcccctccgttgtccgccacccccgggacccgcgccctgggtgggaacacgcctcgcctacctttgtcggggtccagggggttcagggaggtggccagattggcgaactggaggaagaagagaagaaaatgggtgagggtcccgccgcctggcgccccgcccgcgcccccagtggcccgcctcgcgcacctcgcccatgacggcgatgggggtctcgcccttggcctgggctacgcggtgctcgatcaggtagtacatgtactcgtcgtagagcagccggatgaggtggaaggaaccgaagctggcggcgctgcgcagggtcaggtcccggatcaccatggagctggggatggagacggagaggagaccgtcaggccccgtccggcccgaccccctctccccctccccgctgcgatgcgcccgggcctcgcgccagcccagtgactcaggctggatcccgcacagccttcccggcacatgagcccagggccccagcctgcccgcccagcctgcaggctcgggtcgtcgtagaagagcacctgagacccccagggacgcggggccttccctggtgccgcccggacccgatcccgccgcgcgcgcacctgtagaaggaccacttgaggaggaagagcttggcggccttggggaagccggcgctgccctggtagggcttgagcacctggctcaccacgccgtccagccaggccgcccactgctccagcgagttctgctgctgcagcgtcaccttgaagtcctgctccagccgctgcaccacgcggtcctcgcagcggcacacccacgaggcctgctcctggggcacagagggtgggcgggcgcccggggctcagccgccgtcacccccgcctggcccgccccgttaggctgcccctcattcgcccgccccgccccgccccgcgctcacctgcacgttggcgaagtccacgcggttgaggtcgctcagcatctggttgatctgtgcggtgttctgcagcacagcgcgcgccgcctgcgccaggtggttgagcgacgtgtagcgccgcagtgtctgcgcgaaggcgccagccgcggccacctgcgtgcagggattgaggggcttgctgcttccaaggaaccccagcccgccagccctggccccaccccgctgcaacctccctaagcctgtttcctttttcctaaaaaaggagggatgtgcctcgctacttttgttgggacacagaaggatcgggaccttcaaactttgggtgtccactcacaagcgccccccaaaattcaatttattgtgttctgaccagggcacaatattctttgaaatttatttatattttttaaaataactattgagacagggtctcgccatgttgcccagactggtctcgaacttctggcttcaagtgatcctcctgcctttgcctcccaaaatgttgggagtgagccaccgtgccaggaaaggccttttttttttttttaaaaacgaaagaacacaatagataatatggagggcactgcacagaaagggcaaacactgctttgataaacacgtttcattttctttttctgttttttgtttgacactgaatctctctctatccaggctagagtgcagtggcgcgatctcagctcactgcatcctccgcctcgtgggttcaagcgattctcgtgcctcagcctcctgggtagctgggatcataggtgcacaccaccacgccgggctaatttttgtatttttagtagagacaaggtttcaccatgttggccaggctggtcttgaactcctgacctcaagtgatccgcccgcctcgcctcccaaagtgctgggattacaggcatgagccactacgcccggcctcattttctttcgtaccctggaatctcagctctgggagaggacaggggttttgtccatcttgttcattgctgtgtactgagaaggaggttgtgtgaatacatgaatacatgagtctcgctgtttcttctgaagggtttgctcctggatctggcatctactgtctccaaaggccccagtccctgccctgtgcccagcggtggtttttttgtttgtttgtttttcccaaccacatcccatcaaattcctcacatctaagtagtcagcgaatgtgcatcttttgatgaaaaaggcaagtattatgtttccttatagatgttgttgcctttcttaaaaagttttatctgtttctgcacacctgaagcactttctagcaaggctgtctaaagggaactactgtacatttgcagttggtttttatttttgaaagatgctgtgttgagtacagtaacaccacaaagggggttgcatttcagaagtgggtgcctgaggacactggtttataaagacaatgcccagggtgctccccgaggcggagaaggtctccccttcctccacaggcatcatccctggaacaggcgtggggacaaattttaccgcccctggggagcagaggagacggaggcctaagccccagagataggagaaagggaccccctcacactctcaccttcacccgcagcatctcctcggggatgttgaccatggcgtgggtgagccagctctccaggctcttggcaaagttccggatcgcttgggtcaaggcacctgtgggcggtggcgggggtcggtcagggcagggcgggtgtatgtggggcaggggatgccgagcaggccgagcactcactggggatgggccgcagcacgtcgggaatgaggatttccaccaggccctggtacagcacgttgtcacagtgcttggtccattggagcacgggctcgaacttggagaggagcaccaggatggctttgggcagtcgcttctcggcctcgtcatgtctgcgggcacccaccccaccccgggtcactggggtactctatggtcctgcccccatcgtcagaagggaacaggtagcccctgtccctgacccagggtcactggggtactctgtggttctacccccagcatcagaaggcacaggtacccccttacccccactccagggtcagtggggcactctgtgtcttgcctccagtgccagaaggcacaggtataccttgtccccaacccagggtcactgggggcactctgtggccctgcccccagcgtcagaagggcacaggtacccccgtccccaggtaagtaccccctgcctcccaaagatccccagggtctggttggcacaggcccgaggggtgggacgggatcctatgccctaccctccatacaggggtcaaacagattccagaacctgccactccagggagaagatggtgccctgccccatgcctgggcttagtcaggcactccacccccgactgttgagtgtcgggtggctatacacactccacacagccaaggatatgtgtaccccacaaactgcaggggacaagcaggtgccccaaccctggccatcaaaatcacctgcgggtcatgccctcctcccccctctccctcccacagtcgccgggcagtactcacacagccagcggtggcgcctcactgggctggctgaggttgtacctccagaaggtcttccacagcgtctccaccagggtgaactgcaggttcaccatgacgtcgacaatggcctgtggcagaggcggatgctcagggaggctggggggcagcatggccctcccatgcccgtggctgcgtccccgtccacttgcctgcccacctggccaccctacctcacagtgttcccggtacaggacctggaaggctttgatgtccccgggcccgacgccctcaggcagcaccttgccctggaggtcgagctctgtgaagtcagggaggctccgagaggcatctagggggccggggggaaccgtgaggcccttcatcccccttgcctgcccaccctggggtcctactgacctgtccgtttcccatcagactggggtcccccatgtgccggtgagacaacgctaggtggggtgagcgcctggcccgggcccaggacgggcccaggagtgagggcccacactcctctggcagagaggacaggagggtcttgtgccagccctgcctgtctgctgagtaacagcactgcaccaaccctcaggacgtgggcctctgagtcccggctgcaacacagcacccacctggccggggaatgggtaggcacccagggcacagtcaggaccacaggacactgccctgagcctaagcaccccaggttggggctagccatggacagtcgccctagggatgcccctcgactctgctagaagtattgttccccaccctccaaatgggatgtcccggcctccagggcaggtggggaaatgagctcccacgtgctcaggatcaaggatgtgtggctggactgtgggttccaagggttgcttgtttacttagcatcctttggccctgttttcatggattgttgtttactttgtctttttttttttttaagagatggggtcttgctatgttgcccaggctggtctccaactcctggactcaagcaattcctcccacctcggcctcccaacgtgctgggattacacacgtgagccactgcacccggccttttttattttcctgagacagagtctcactcactgtgtcgcccaggctgcagtgcaatggcatgatcttgactcactgcaacctccgcctcctgagttcaagcaattctcctgcctcagcctcctgagtagctgggattacaggcacccgccaccacacccggctaattttggtatttttagtagagatggggattcaccatgttgactaggctggtctcgaactcttgacctcaagcgattcctccagcctcggcctcccaaagtgctgggattacagacatgaaccactgcaccaggccttacttttagaaacactgggtacacacctgccttcttggcgagtgagtggtcctagccctgtggacaccatggctgtgggatggctggatgggaaagcgagtgggcctcacaggactcatgagagaagaggacctgccgtcatatctccaaaaagtaaccatgtccaactgggtgggatttgaaatctcatgtatgccgggcatggtggctcatgcctgtaatcccagaactttgggaggccaaggtgggaggatcacttcaggtcaggagttcgagaccagcctagccaagatggtgaaaccccatctctcctaaagttactaaaattagccaggcatagtggcacgtgcctgtagttccagctactcaggaggctgaggcaggagaatcacttgaacccaggaggcggaggttgcagtgagctaggatggtgccactgcactccagcctggacgacagagaatctatctcaaaaaaataaacaaataaatacaaaaataaagaaaatctcaagtagcataaaggggattcactgggaagctcagaacccccgagaaatgctttgcattgaaagaaatgagaatctaccttgaagaaggattctagggacagaactgtcactgtggacggagactgtgatgtctcccccaccccctgctggttctcgggcatctctcaccaagccctccccagctcagaggctgcctgccgccatccagctttgggaaccgtctgcacggggcagggaggcggtggttggggaagcacgggccagggagctctcacccaaaaattgctggtactgctgcacctgggcgctgatgtccgacagccccgtgctcggctgctgccccaccgccacgccgttggtcatgccttccatcttctggatgggcttgagcctggagtagaatgggcaggtgggccggctgctgggggccggcctgtgtgcccttccccgcctgccctgccctgggtccggccctgccttcctacctctgcttctgcgagaagggctggccccgcatggccatgtgctgctggtcctccatcagccgcagcaggggtgagctggccttgatgcgcaggccatagtagtggtacttggagttgcccctgggagggaggtggaggggaagggctgggctgggggtctgccggctggccggccatggagcacctcacagcacacccgtctcctctctgttaggagaatggatagagagacgcctgccctgcagagacgggggtgctgcactgaggaggcacaggggctgtgggtgtcaggagagatccagcggtttgcccaagattatgcataaatgaatggctgaatggatgaatggctgaacgaggtgacgctgaagctgggaatgggaaccgagacgtgagcggaggtgagccatgggggttgcaaaggagaggaagagaggggcgggttcttgggatgccttcttgttccttcccgcatgaatttactgactcacagaccctgatgaagcactgactaggtacaaccccgcgtcatcgaggtacgagcactgcagacggaccagaacaactgaaataagtcatgtaaaaggcacgtgtgggccgggcacggtggggtcatgcctataatcctagcactttgggaggccaaggcaggtggatcacttgaggacaggagttcaagaccagcctggccaacatagcaaagccctgtctctactaaaattattttttaaaaattagctgggcgtggtggcacatgcttgtagtcccaagctactcaagaggctgaggcatgagaatggcttgaacccgtgaggcagaggttgcagtgagccgagattgagtcactgcactccagcctgggccacagagtgagactcttgtctccaaaaaaaaaaaaaagtcacgtgtgagcgtgctgaatgctaaagagaaaaataaagcagggttggggggtgtcgggcaggggagagggggaggctgcagttttagttgaggcagtcaggggacgtgcaagtaaggaggggtgagaagcacatgaggtggaaggcaccgccagtgcaaaggcctagagtgggagtgagcggggctgtcgaggagcctcgcagaggccggcgggactgggctggactggactgcctgagatgactcggagtgggggtgggccttggcatgcccaccaattccccagggactgctgggagtagacggatggccctacctggtgcccagacggcgggttcgcaggcccatgaagacggagcggatgagcttgccgaaggaggcggcgttgacgggctccagcttctgctcctggcagtgcagtaagtagtggcagtagagggtgctccgtggcagactcacgccctcagccgtctcatagttgtccaggagccactggacctggggtgggagggagatgggagagcaccagtcagaggcgcttccgtcatctctgagtgctggggctgagtgccccacatcgacttccagctgggatcctgacagccacgcccacataagttagcacatcctactgccatcctctccaagaactatgtcccacagaactctagaactgcactgtccaatacagttgccatgtatagctaaatacattaaaggccgggcacggctcacccctttagttccagcactttgggaggctaaggtaggaggatcacttgagcccaggctgggcaacatagggagaccctgtctctaccaacgaatttttaaaaaaattagctagtgtcgtggtgcacacctgcagtcccagctatttgggaggctgaggcaagaggatcccttcagctcagaagttcaaggctgcagtaggctatggtcaagccactatactccagcctggatacagtgagaccttgtctcaaaaaaaaaaaaaaaaaaaaaaaaaaaaaaaaaaaattagcaggacgtggtggctcatgcctgtaatcccagcactttgggaggccaaggcaggtgggtggatcatgagatcaggagactgagaccagcctggtcaatattgtgaaaccccgtctctactaaaaatacaaaaattagctgggagtggcggtgtgcgcctgtagtcccagctgcttgggaggctgagacaggagaatcatttgaacttgggaggcagaggttgcagggaggcagaggctgcagtgagccaagatcgcaccactgcactccaacctgtgcgacagagcaagattccttctaaaaaaaaaaaattatatgaatttatgcagaatgaaaaaaatcaaattttcaagccaggagtggtggctcacacctgtaatcccaacactttgggaggccgaggcgggcggatcacctgaagtcagaagttagagaccagcctggccaacatggtgaaaccctgtctctactaaaaatacaaaaattagccaggtgtggtggtgggcacctgtcatcccagctactcgagaggctgaggcacaaaaattgcttgaacctgggaggtgggaaggttacagtgaactgagattgcgccactgcactccagtctgggtgacaagagcaaaactccatctccaaaaaagaaaaaaaaagactagaatagactagaagccaggctacatcaggaccatgagggaccaccaggaccaccagcgctgacccaccccacaatcacacaaatgtcgaagggcccggttggggttggaatccagggctgccccagggacttcacacaaccacttctaggcacagggaggttccagcacccgccttcctgatggtggaagaaccctgttcaggaagctccccatggcagtgctggcttctctctgccctcattatctattctctataatcaattttaatcagaatagatggctgggaggatcgcctgaggccaggattttgagaccagcctaggcaacagagtgagatcctgtctctacaaaaaaaattttttaaaatccgccaggcgtggtggctcacgtctgtaatcccagcactttgggaggccgaggagggtggatcacgaggtcaggaaatcgagaccatcctggccaacatggtgaaaccccgtctctactaaaaatacaaaaattagctgagcgtggtggcacgcctatagtcccagctactcgggagactggggcaggagaatcacttgaacccgggaggcggaggtcgcagtgagccgagatcatgccactgcacttcagcctggcgacagagcaagactccgtcttaaacaaacaaaaaaattagccggacatggtgcggcatgcctgtagtcccagctacttgcaagggtaaactgggaggatcacttgagcctgggagtttgaggctgcagtgagctatgattacagcactgtgcttcagcctggacgacagaacaaaaccctgtctcaaaaaaaaaaaaaaaaaaaagtagacaacattttttttttttttttgagacagaatcttgctgtgtctcccaggcttgagtgcggtggcgcagtctccgctcactgcaaccacctcccaggttcaagcaagtctcatgcctcaccctcctgagtagctgggattacaggtgcataccaccatgcccggctaatttttgtatttttagtagagatggagtttcaccatgttggtcgggctggtcttgaactcctgacttcaggtgatccacccacttcagtctcccaaagtcctgggattacaggtgtgagccacagcgcccagccaacaatagacaacacttctgtagtattgtgttaagaatttcatgcatatcagctgaggcccagagaggctgagtaatttatctgaggccacacagcattcaatcccaggacatctgcatatgttctcttcattgggggccacacaggctcctgctagcggtggttggtaaccaccgtcatggactgggcttctagtgcccaccacccaccactgcctgcctcctctggggcccgcgttggggcacttaccgtggctggcgaggcacgggtggtgtgagagtaagactggctggcactgcccagcatgtagccgccttggatcacgtaggtgcctgctccgctgccgccgcctccggtgctgccactgccacccccgccaccgcctcccccgccgccgccgccaccaccactgccaccacctccgctgctgttgctggccccagccccagtgctggtggagctggcgacgacctggctgccggacacgtacatgggcatggagccactgctggccaccgcctgggaggtggcgggggtgctgacctgggtggccgtgcctgcggcctcgtagtagctggtgcttgccgtctgcgtgtacagcggcgtctcgggataggagtaggtgctggaacggctgggaaagaggcaaagccaagggagagtcagggggatgagaactggggggccgaggggcatgactgtgcaggaaggggggtcctaggaggggactggggaagcagcagctcccctgcagcaaggagcagatcctagcattcatctacaacggactgggtaccatcctgagtgcttgatgggcagtatttcatataatcatcagctgggcatggtggctcctgcctgtaattccagcactttgggaagcagaggcaggaggatcgttgaaggccaggagttcaagactagcctgggccacatagtgaaaacccatctctacaaaaaatatgaagattagccaggcatgctggtgcacacctgcaatcccagctacttgggaggctgaggcaggaagatcccttgagtccaggagttcaaggttgtagtgagctataaccatactaccactgcagcaaagcctaggtgacagtgagactctggctttttatttttgttattttatttatttatttacttattgagacagagtcttgctctgtcacccaggctagagtgcagtgtcgcaatcttggctcactgcaacctccgcctcctgggttcaagctatcctcctgcctcagcctcccaaggagctgggaatacagggctcaccaccacaccaggttaatttttgtatttttttagtacagttggtgttccaccatgttggccaggctggtctcgaacttctgacctcaagtgatccacccgcctcagtctcccacagtcctgggattacaggcatgagccaccacacctggccgaccctgtctttttaattaaaaaaaaaaaaaaataccgaagggttagggaacttggaatgctacacacttcattaaaaaaataaaattggcaagtacttcgagtgcctactgtgtgctaggcactgtttcacacactttggacacagcaatggacaagaatgaaaagccccggcccccggaaccgtctagttggggagacaggcaagaagccacgtgcaaaggtaaatgagagatcataacagaaggtgatcaggcagtgagtgaagcaggaagggggtggggctagagaaggcgatgctgtgattggaagggactagagaaggcgacgctgtgattggagaagaccatcaggaatgcagatatgtttcccctgagccaagctacctatcccaggctggggaagcctctctccttcagatatcgcgtgacgggatgggcaccggtgacacaggcttgaggctgcaaatcgtcacaagtatacaagtataaaaaccaccaggggttcaacctcaaggggctgttaaacaaaagatgatggaatcctatgcaggggtgaaagagaaggaggcaaggcttgtcgtcccccgaaagaacaagctccagaacctaacaccgggcagataagaggcagagaagagtggggaccgtgtgaccgaacaatagggaagaatgcgttgcatgtggcatgcgtgtctgtcatctgtgggcatggagggctccgtcgagggggacaggcagggggcacctctcaccatctcgctaaacatcgttggacatagttttgatctttgaactctttcaatgtactagtgattaaaaacatagcattaggccaggtgcagtgtaatcacacctgtaatcccagcactttgggaggacgaggcgggtggatcacttgaggtcaggagttcgagaccagcctggccaacatagtgaaaccgtctctactaaaaatacaaaaattagccaggcatggtggcaggcgcctgtagtcccagctactcaggaggctggggcaggaggatcacttgaacctgggaggtggaggctgtagtgagctgagatcatgccactgcactccagcctgggtgacagagtgaaactccacctcaaaaaaaaaaaaaaaaagggaggggggcaggggcaggcacggtggctcacacctgtaaccccagcactctgggaggccaaggcgggtggatcacctgaggtcaggagttcaagaccagcctggccaacatgatgaaaccctctctctactgaaaatacaaaaagttagccgggtgtggtggtgggcgcctgtaatcccaactactcgggagactgaggcaggagaatcgcaggagaaccaccctgaaggtggaggttgcagtgagccaagattgcaccattgcactccagctgtgcaacaagagggaaactctatctcaaaaaaaaaaaaaaaaattaaacatccagaaagacagtgtggtcagtcaagaggtggcctggctcagactctgaaggtggcaggggagggagccgcacaggcccgagtggttgtgggtgaacaaagagagggagttgagggggacagtggaaggagatatggaagcatggtctttgtcacacatcaggtccagctctcgatctctctgtcctgccctatgtctaccacacaaagtgacaccaagagcacatgacctgagcaagagcccctacttctccaaggcgggggccacagcctgctcactcctgcacacccagcatgcaatgtgtgctgcaaaaaggttgctttggtagatggttgctgaatgactgaataaatgaatgtgtgcagctctggatgccccccagaacaggaccagggatggaggcccaggggctgtggctttggccagggtggggatagggctggcaaagggtcgggaactcgcagtaattcactcagagggagagacagaaggggtgggcagctgacagcaggagtggcccccaacaacttctcgtagcagaaaaacccgatagcaacgatgaactaggtgcaatcacacacactatgatcactgagagaggaattcagacagaagcaaaggagagacaggagagacgctaccagggatggcagcaggaacccttggacaccgtgttcctctttgcaatgccctgtctggcccctgccagcttggctcaaccacacagtgaaaagattagcagcactggaaagaaacaaatggaactgtgaggtagccggacgccggggaccaagcctcacgatttagatgcctggaccaggcccactggggtcggtcagagcatcatgaccctaggactaagtcgatccatgagctaaccaatcccagcattgtccccagaagaacaagtggcagggatgaaaaaagaaatcatgcaaatgcaaagaaaaccaagtgaaacctctggaaactaaaccaacagtaactctagtactgcagcaatttctgtggagatgggagagggaaggtggcatggaggacccccggcgaggagcccgagccgggactgaagcggggccaggacgtggcccctgcctgacacggcccatacacaggaatggtagtgctgtacccagggaggggaagaagccccctatgcatcactgggtggggactgatgacatcgtggctgctgcatctgcacaggggttattacacagcagctaagagggtgaccaggacccacgaggacacatggtagaagagccaggaaagaaataaggtatggatggaatgtcctgcgtctatttctgaccacagaaagcgggtagaggctgggcactgtggctcatgcctgtaatcccagcactttcggaggccaagacgggaggatcatttaagtccaagagttcgaggagatgagcctgggcaacgtggcaaaaccccatctctacaaaaatacaaaaattagctgagcatggtggtgcacacctgtagtcccagctactagggaggctgaggtaagaggattgcttgagcccgtgagctgcagtgagccctgatcgcgccactgctctctggcctgggcgacagagtgagaccctgtctcaaaaaaaacagaaaaaaaaagtccagtgcggtggctcatgcctgtaatcccagcactttgggaggctgagacgggtggatcacgaggtcaggaattgaagaccagcctgaccaacatggtgataccccatctctactaacaacacaaaaattagctgggtgtggtggtgtgtgcctgtaatcccagctacccgggaggctgagacacgagaatcacttgaacacaggaggcagaggttgcagtgagccgagatcacaccactgcactccagcctggcgatagagcaagactccatctcaaaaaaaaaaacaaaaaaaaagaaaaaaatggatagagggctagagtttctgttcttagagtatctctggaaagaaacaaagaaacaggtcacagcatcctctctgggacagggttgagagtcaaatgattttttttttttgagatggagtgtcactctattgcccaggctagagtacagtggcacgatctcagctcactgcaacctccgcctcctgggttcaatcaattcttctgcctcagcctcccgagtagctggaattacaggtgcctgccaccactcctggctaacttttgtatttttagtagagacagggtttcaccatgttggccaggctagtcttgaactcctgacctcaagtgatctgcccgcttaggcctcccaaagtgctgggattacaggcgtgagccaccgtgcctggccttttttttttttttttggttaaaaaccaggctcatttgactcccaagccctaagctatgccggggtgcctttcccaaccttcaagggtccctctgcttcgccacttttcgtggctgtggctgcccctggggagtgcccacctgtgtgtctgtcacctgaggccttgaaggccggatggcctgctgggggctgggactggggactggtgtcctgggagactggggaggctccagtgcagacctgactccctcacccacccctctcccttcacttacatggcactggccgtgtagctggcatcgccgccctccacatactgcacctggctggagtacacgtgtgggacgggcacctgctggagctgctgcacctggggcagaggaagggcacgtggagggtcaggggtgggccagctcctacggttctccctctaaagggctggtgcccacccaggctatccctgacgcccagctcccggacccaagggtggcttctggactctcaacaaaacaccctggaggaggccagggctgggaatcaggaagagctgtgtcaggagaagccaggactctcggcttcggctggggccagcaagggtggggcctgacggacagtggaggggacccgagacagggtcctgtagtgggcgtgaaggttggaccccaggcacaggggcaaggctatcgctggagccatggagctacagaaagggcctcaggggtggggcctggaaaccgggcacaggatgtgaggggcggagcctggggccccggttggtgggacagaacctggaatcactgacagggccttaggggcggggcctgagtcccccacctccatcccccacccttgtctgcaggggcggagctgggacctggacggggcttgggtggggagtcagaggcgggtccctagaccgacccgtcgggcggaggtggggtctacagggcttgcggggcctggtgggcggcccagactgggcgcccccgcccccgcccgcccgctgccccccgcccgtgcgtccgccacctactttgagggccgtggcggccgtgccgaacactagcacctgggggattctctggatcctgaccctctggtcggggctggctcgggccgggagccgggacagtggctcgaagaccactttctgctgcggcaggagcaggtgtgggggcagcacgcccaccagctccacccactgctcggcgcccggctcgtaatggggcggcggcggctcggggctgcctagctgcggggcctcgccgctgcacgcgggcggccggggcggcggctccggcggcggcgtgggccggggatctcgctgctctgccttcctagcgggaaactgactgcctgagctctggaggacaaacagagacactggggggtcaacgggggcggccgcgggcggggctccaggcctccacccaccgggttgctgagcgcgcacgcagccacccgagggaagatccccgccgcccggggtctcggagaggggttagaactgacccagggccacgcaagaaagaagaggggtttgaatccagatctctcttagcaaaacctggaccctgagctgccagggggccgggaaaggggaaggatgtagggcagtgtctgcagctcacagaggcatttccctccctgcggcctcaggggcctgcactccccagccccagcccgggaccagcccctttgcccgtggggtaggagggggagacacacacctcttgagccacgtggactggctggaggccctgcacggtcagcggctgcaccgggccgggtttgggcgcttgtggagtggcctggaccacagatctctgggaggggaaaggcaacaataagatgaccatggcaacgatggccgtcaacctacccagcccctgcacaggtgagcttctgtaaagctcacagcagacccataagcaagaggccaccattctccagccaagcaaggagggtgctggatccattactgataaagtgaggctcccaggaagcagcagggctgagttgaacctgggactaacttcggggtctctgctctccgccccctctccctacgggcccctgaagctgtgccaagaacccgcaggcaaggccttgggttatctttcgtccccacaccccccaatgtcaactgtgtgccctgttctgtgctgtggcgggcatgcggggattatcctaggggcgcagagccagggacggaggctggcggaggagggtgctgagtggaggagctggggcctggacctaggtctggaggttcgggggggctctagtgccaggcgggggagtatctgtgaaacctctgggacagggtttctgtttacacttggggaagggtctatggatttcatctgttttttcaaggggcttggaaccccctcaacttcagtggtaacaaccagatggtgcgcagccccagcatcttaacctgcgccggctcagggctctgcctcctgcagaggctgggtgtggatttgggggctgggtcccctccctgaaatcctccccagaaggagccaggatgtggcctcggggcttccttcaggcaaatgggcccaaagaggctcaggtggcttctccaagcggttcccatggcccactacgccccagtctccttccaggaggttcaaatttcgtcctccccgcggctcccccatcctctagccccaggatgctgagtctggagacaggcagagatgcttatcaaaggccagggtggcaggctggggctggacccacatgggctgggctctaataggccagaggcacagccgtggggggctgcagaggctgcctggccggtacccctggaccgagccactgcccgccttggcctggcacctcttgggtgacggggacactctgctggacgccgtggacctgcagctgctgtggcactgtgcccgtgggggccccggctgtcttgctggaagagctgttggcctgcaccggcgactgctgtaagggaaggagacacaggagtgccgctggggtgggcttgcatcctctctgaggtgggctcacacacacacccttctcaggagagctgtctggggagggcggcagtctgtggggacctatcccaaccaccgaggctggtaactgaccgcgtcccacgcatccaaatgcctactccctgcaacagtcccagtcaactcccagcaatgatgggggtttaaccctccccagcaaggttggctgatggtgggtggtgccgccagcacccctgaagctctcctggggctgaccctcaaaggttatagcaatgacgacagcagcctctggtgtgatattgggccgactcccaccagacactgcactgagcgctttaaatgtactcactggaatctcatggcacccccacttcccaatggaggggcagaggggaagggacaagccctgggtcacatggctgcaggcgatgaggcacagggctgagcccaggcaggctggccatagagccccatgtctgctctgagccctactgtgcctcaggctgtaattcccacagcaagctgaggggtggttgataccatcagttgtttgacacagagaaaactcagggctcagaaggctcaaaggggccgggcatggtggctcacgcctgtaatcccagcactttggaaggctgaggtgggcagatcacctgaggtcaggagttcaagaccagcctggccaacatggtgaaaccccatctctactaaaaatacaaaaattagcagggcgtggtggcgcatgtctctaatcccagctactcgggaggctgagacaggagaatcgcttgaacccaggagtcggaggttgcagtgagctgagatcgcaccacttcactccagcctgggggacagagcgagattctgtctcaaaaacaaaacaaaacaaggctcagaggcctgcctagagtcccacgagaggaagtggctgggccagccatctgaccccgagctcctgatgcagacagcatccacagcctgtcttcaacaccctcattggtgttgtgggtccccagaatctaccctgtggtccaaggcttcctggaagagactgtcccaccctccggggggaagaggaacccactttgtttctcggaatgcagttccctgagctggagctgccaggaccatctcaacccaggaaatcacctccttctcccagagcagagctccacggccgcttagctcagagctggcagggccaggaattgggcagctaagccaccctacctggggtcaacaagggcgttgcactgggagtgaagagggaagcaggactttggaggagcaagtgggcttggggggcggggcagggagccccaaatatactatggggatacattgctgacctcgggagacagcaggggggagggcggccaacaggaccaccacttacctctgggggcgagtgcacctgctgggtaccatggaccgtcagggagacctggccacctttgctgcctggggctgcgctctgcaccaccagacgctgcgtgggaagagcctggggccagggagggagagggagggcagatcactgatgacagcccgtgcagttgcaccgagcatctgcgcagtgccaggtgacattctaagtgcttcacgcctgttagctcacagaatcgccctgacagccctgatgaagctcggctactgcccccacttcacagagggtgacaccaaggctcaggacggcaaaggcacttatctgaggtcctaaagccaggaagcggcagagccggagttgttgtcaggccatgtggaatgtgctgtcatccttaaaacccaatagtcctaggctgggtgtggtggctcacacctgtaatcccagcactttgggagactgaggcgggcagatcacctgaggtcaggagttcgagaccagcctggccgacatggtgaaatcttgtttctactaataatacaaaaattagccaggtgtggtggtgcacacctgtagtctcagctactcaggaggctgaggcaggagaatcacttgaccctgggaggcggaggttgcagtgagccgagatcgagccattgtaaaacccaacagtactttgtccagatctgcgctgatcagtcggaaacgggtgtgcgcggcacctcatgcgcagccttctgggggacagaccaccctgtgctggctgtggactcctgactctaaacctggccttgggttctctgcttcgggacactgggttggacccgcaaaccaccttcccaactatacatcttgttctctctgctgagatggctcctgcagctcctctgtccctgatggcccctgccggatagtctcaccctggggaggtgactgcccagagccaggaggtagggcagcccctggatggggactcttccctccatcctggtgaggacagatccaggcttgccacagggggttggtcctccaccctgagggagccttccagggtggtggccaggtgcagcagcattacctgctggggcacttggatgttggtcagctggaggggcgacacgtggcctggcttggcctgcacgctcgtctggaccagcagccgctgtggagacaaggcaggaggagctgagctgccacttcccccagggaggcctggcgtggttgggtggcgggcggctgctgtgcacatcttgataagaacaggtgagcagatggctccagcaggaagcggggaggggaggtgaggcccccgaggacgcagcctgcactgcccccctcccgggccctcccccaccccctgggagggccacatcctacctgctgggtgccctgcacctgctgaaccacctgagtaggaacgccggtctggctggcggtggagccggggctggcctccgacactgtctcgctggcccgcatggcaccttctgtggggaggggccaccaggtcagttcttcctgctttccctgcccccagcctaagcctgagcccccctggaggggaagatgcagcctgaagccaacccccagcaaggtcaggcccctccaagagtcctgcttccccctggccagccctgactgcacccatcaggggcccacgtggcagagcgggctgaggcttgcaggacccaggatccttaatacctggcagcagccctcatcagctttcctcatcctgaagtcagaccagatagggtgactgaagagctatgatgctcaaaacccagaaggctggacccttcccagcagacgggacttgtggacaggcagggaactgactgtccactccagggtcctggcagcgctggaaggatcgaggtgctggggccaccttctctggggtgaccctggcttcccgggagtggaagctgctcggaggagtggtccctggaaggtcttgctagcctgtggccaagtcctccctccctgcccctctgtcctcagtggggtggggaccacaaggggcttggagtgggggaggcaggtactcacgctgacaggcagctgagaagagacaatcatagaacatggtgctcatcccctcccccaccccacccgccccccaccccgtccgcctgtccgtccaggggggcctgcctggccctctttgctccttgcctgcctctatagaacagcagggtgtgcaggtggctttatacccacgaccttggggcgctaatccccccggtggatgcagagagcctgcctgccctcttggaaaaacactcccctccccagcaaagcggggccttcgcggggctggggcagcgctgcggggtgaggagggaggttggtacccggagatgctatcaggcaggcacaggtcaaatttcatgcacatcttgctgagtgattagcaggggtgctgggggtagaggcgagtgttcccaagaggcgctggctagaagaccctcaccccagctgggacaccatccatcccatcccctccatgtgacctggcatacccccagcagctccagaggccgaggtggggctgggggtggacatgtacctgcccttcctccaccatcaaggagccaaggtcccaggcccacctttcttggggatttagaggggtttatccgacccccggcaggactgaagggccacgggcaaggagttatcactgcagacactagtgttgcttctggcacactaggtgttatgttagactctggacagccagagatagagcttttttgtttttttgagacagggtttcgctctgtcacccaggctggagtgcagtagcacgatcttggctcactgcaacctctgtcccctggggttcaagcaattatcctgcctcagcctcccaagtagctgggactacacgcatgcaccaccatgtccggctaatttttgtatttttaatagggactggggtcttgctatattgcccaggctggtctcgaactcttggactcaagcaatccacctgcttccatctcccgaagtgccggaattaccggcgtgagccactgtgcctggctgacagtaagagctttccgggatttttttttttttttgagacagggtctcacagttgcccaggctggagtgcagtggcgcaatctctgctcactgaaatctccgcctcccggttcaagtgattctcctgcctcaacccactgagtagctaggactgcaggcacccgccaccacgcccagctaatttttgtggttttagtagagacggggttttgccatgttggccaggctgctcttgaactcctggcttcaagtgatccgcccgcctcggtctctcaaagtgctgggattacaggcatgagccactgcacctggctgacagtaagagcttttattacccattttcagacaaggcaacagagaccagaagcaaggaagtgatctgtccaaggtcaaatgcaccatccaccgtgcaggccatgacgcaggttcccctctgggcccacacgaacctcataccacatatggaaccggagtcactggttctgcctgggctgcgccccaagggcagtgatgtgtgaacttgggtatatgggcacaggaaggaaagtaagctgggggtctacggggacccctcaaagtctgaagtatccagactgggtctcggctgtccaggcagggcacaggagggagaggggcctggacagggcaggagggctattcagggcagatgcaaaggccaagtcaagggcagagcgcaggagtgtgtgttgggggcgggggttgccagatgtgggaggtgttgggggaggcctccgcgtagccgcatgtgggctgtggggcatttggtcaatcccatgcctgcctgaccagctacctgtgcagccaattccacaggccctaatccctgtgttttgctggaatcttccctggcatctgctttaggcttcccagccctgagccataagggaggaggcccttgctgagagggcccctcctgggagaaacccgagacagccccgagtcatgtgaccggcactgcacacctgggtccgtggggtccaaggactcaggcccagcctaagggatggtgtctcacccaggaagctcaaggtgggcagggagtggggggctggccccccaccctctccagggctcaggggctggtcgctgagcaggacctacagcaggaggaggcctggggacctgctgagaccaggtggctgtctccaggaagcagccttgcccgtctcctgcctctggggtagccctcaaggctgggaccccgcctgccagcccaggagggcgccaggggatgcgccacgaggctaacaggtgagcctgagtgactcatgcggatgagggcttcctgtgcagccatccctgtctgcctgcggccggggcagggcccctccaccactgggtctggccctcgctgtgtttcagggaggagaagccaggaggggaagtggggggtggcactgagtctgcgagcgagcgtctgcatctatctgccggagatcgccactctgggcatgcgcaggaggccagggaggcccccactgtctcaggaaacggcggccgatttcctgtctctgaatctgacacattaacatctctgagcagtggaatgactctgacaagtgggcacccatcctccccgggccccgcacttccccatctagacctactcaaaccttaaatgagctacttgggggagcccaggggaggccctagaggctggactcctggcatccaccctgggggcctggcccccttccccatagacagatggggccacctgaccctctgcctcctgcccctgggctccctgggatgatgtcagtcaggggctcctggaggggcccctgctgcccccagtgtcctctatcccttgtctgctccaacctcagtttccccatctgtgcttgggaatgctgacaaacacactccacttctctgtctggacacaagtcttcttggcccccctagaactccaagtgagagagaagcagggaagaagggccggactcggcccctccttcggggcggcccctgttccctgcaggccggctcggtttcaccttcccaggagtggctgccagagcccacagcactctccttccgccttgggttctgggagagtctgatggcctctgaggacagggatttatggatctagtattgttcctgaccagggaaacttgatcttccttcctaccacctccaaagtcacctttaggcagggcaggcagggaccggggctgggtgagctgtgtctggtttggtgtcggctggtgtccagccccaggctccaagtctgggtccaggcccctcccttcctcttccctgccacctccctgggtccctggtcagctccgattgctcctggcttgggagaagtcctaggtgccttgtggcagccttcactggtgtcagttactcctgcttccccggcgctcacgtggccccggccacccttagatgaggaaggacgctaacctggcagagggtcagggaggaaggctggggagttactgcaaggggtgggggaggggacagctggcagggcacaagccaacctcctcttcctcagaacaaatccaggaagcattgcccagtgacccttctggggacaggctggcacctgccagaatgtggagtggcagggaaatgaaattccctgggaccactgtgaaaggcgactaagctaccgcctgaccaaagtgagccccagagagttctgtggacagcagggttgctacagcctgccctcatgggtacagagtaccctcctgggaacactaccaagatgggggagacagaggccacctccccatgcctaacagctacttagagtccggcctagctctgtctgacccaaagaccatgccttgctcttgacttgctcttgacttcttgctcttttttttttttttttttttgagacagagtcttgctctgttactcaggctggagcgcaatgacatgatctcgactcactgcaacctccacctcccaggttcgagcgattctcctgccccagcctccccagtagctggtgctacaggcacacgccaacacgccgggctaatttttgtatttttattagagacggggtttcatcatgttggccaggctggtcttgaactcctgacctcaggtgatccgcctgcctcagcctcccaaagtgcggggacttggtcttgactttgaagcaccagggcccccctgagggagtgcgggaagagctggagaagccaaggtcaagagtggaaggacttggggagtggtggagcctggagctgtgtgcccactccagaccctggctctagggagcctggaccctgaagcaggtaagacccacacccagggcgtggatcaggacccatcagacactctgggcgccaagcagagccatccactggtgacatgcgaggcctcctgcaaacagtcagccatgcaggagctgatgggacatgatggctgtgctaggtgctcctctaggctgttctgggtcaggctggtgctcctcagtcattccacagagactgagcactgacagagccctgcctgcaggtgggcacccccaccatcccattattgtaacttcaagtagtgttaagtgttaagaagaccagcggggcgcagtggctcacacctataatcccagcactttgggaggccgaggcaggcagattacttgaggtaagaagtttgagaccagcctggccaacatggcaaaacgccatctctaccaaaaaatacaaaaattaccctggtgtggtggtgcgcccctgtaatcccagctactcgggaggctgaggcaggagaatcgcttgaacccaggaggcagaggttgcagtgaactgagatcgcaccactgcatccggcctgggtgacacagcgagactttgtctcaaaaacaaacaaacaagaagacagagagtgagcaatgggggtaggggcagggaggtgtggagtcagaaaggtagtgtctgagcagcgacctaagggagacaagaggcaagctcccagagggtctggggcagggagtgctcctggcagagggtaccgagagtgcaaaggtcaggaggcaggactgagcctggcgggtttgtggagctgtaggaaggcaagaggggctggaccaggtatgtgaggggatgggtggaagtgggcgaggctgggaggctggcaggccagagttgaaggggcttgacatttgctagtaggggcacagggtgtgtggagcatttttgcattttgtttttgtttttttgtttttgagacggagtttcactcttgttgcccaggctggagtgcaatggtgcagtcttggctcactgcaacctccacctcctgggttcaagcgattctcctgcctcagcctcccaagtagctgggattacggcgcccaccaccacacccagcttagagagagagagagagagacagacagacagacagacagacagacagagagaaagagagtgtgtgtctgtgtgtgtagcttttaaagtccttttttgtcaggtatcgggggaggggaaggagcctgctctcccagagctgagaaagcctaggctggggtttctcaaagagtgcccatggaaccacctggcttggagccatcagggttgagctaggatgtgacgggacctaatggacagttgtgaacctgctccctctggctgctgggaggggtcagactgtgagggcggaggctcgaccaggattggggtcatagaagtggaagaggcggggggggttctggaagagtttaggaggtggagccgagaggtcttactcaaggaggagtaggacagaaacaagactgaccgtgggcctgggaggatgagaaagccttgaaggagagatttgaagagggaaaaatgcagaattcaatgtggctgcactggcctgcatcaaattcaacaccaagtggatgagtcaggaggggctggatgtggggtcctgcggttcagggttgcagcccaggctggagacctcagtgtgggtaatgagagctgggacacaggatgaggccatcgttaagggagaactacaggagctaagagaggttcccaggtctgagtctggggctccccgtcctttgctgacaaggtcagggagatggggagaagcagcagagaggaccacggaggggctgcgggcggtgggcggagaccagggcagtgtgggctcctggaggcctcacaagaggggatctttgggaaaaagggggccagctgcagggggtccagcagctggaggttcctggagaaaatgggggcttggctgggcgcggtggctcacacttgtaattccagcactttgggaggctgaagtgggagaattgtttgaggccaggagttcaagaccagcctgggcaacatagtgagactctgtctctacaaaaaaattaaaagattaggccgggcgcggtggctcacgcctgtaatcccagcacttttggaggccgaggcgggtggatcacgaggtcaggagatcaagaccatcctggctaacacagtgaaaccccgtctctactaaaaatacaaaaaattagccaggcatggtggcgggcacctatagtcccagctacttgggaggctgaggcaggagaatggtgtgaaccccggaggcagagcttgcagtgagccgagatcctgccactgcactccagcctgggtgtcagagcgagactttgtctcaaagaaaaaaaaaaaaattacctgggtgtggtggcacatgcctatagtcccagctacttgggaggctgtgagagtatcactgagcccaggagttggaggttacagtgagccatgattgcaccattgcactccagcctgggcgacagagcaagaccctgtctcaaaaaataaatacataaaaaataaacaaaatgggtgctgttccaccttgatgggtggatgggaagatctgcaagagggggattaagtgatgcagaaggaactagaaggagcaatggcaggagcgtgttctggatatgggtggtgctgcttaatccaagaaggcaaaggtggtgggtgcagatgcaccccaggagctgggcaggagaaggggtccctgtggctgcctgatggtactctgtccccagtaaggttgcctgcagggtcagggaccaggatcatagtataagacaaaggtgatggaggtgaaggtggggcagagggagaatgggtttcttggagcatgaagttcactgttaaggaaatgctgcaggatttctgaggggtgctgagaacccaccagaggtttgtggcctgaagaccctgcccatgactgcagcccgacctcaaccagggcagggctgtgtctacacaggcgggggggcactaagtgtggcgctcatgcggacacctccactccgtccatatagtaaagagtcactgccctgagtccctgcatgttcccgccccaaacctctgccagagaccctggacctcccacgcagacactgccagaagcctctgggacactgcccagggctccagccccatctgctttgttccacaacggggccaattgctacacttttcattactttttttttgagatggattctcgctccgttacccaggctggagcgcagtggcacgatctcagctcactgcaacctctgcctccgggttcaagtgatttttcctgcctcagcttcctgagtagctggcattacaggttcgcgccaccacgcccagctaatttttatatttttagtatagatggggtctcaccatgttggccaggctggtctcgaactcctgacctcaagtgatccacctgcctcggcctcccaaagtgctggggttataggtgtgagccaccacacccggccaattgctacatgttttgatgactctttatgacctgatggtccccaatcccatcttgacccaccccttccacagcccctcaggatgccctgatgatctcaccccttccattcccactctgagaaggaccagggccagctttgatccgggctcccactgaggcctccgtccaccacagagcacattaaaaacacactagctgtgcacagtggcaggcgcctgtagtcccagctacctacaaggctgaggcaggagaatcacttgagcccaggagttcgaggtcagtctggacagcatagcaagaccccatctctaaaccaaaaaaacacacgaatctagcctaatgcccaggctgtgctgccattcccaccagagcactgagtcagtcgagacagagacccagccctcaggcagaccctaaaccagtcaaaacatcgtcactatgtttactgtgggaaatgctcagagggcaacaggtctgtccaagatggcctgctctcaacacaggtcctgcgtgccttagcttatgtcatgagaaagaaaagcaaaaataaagaaaagggccagtccctggatcctgcccaaaacaacagggcggctgctctaggaaggggaggtgacatgtccaggccctcacccccagctgacctccctgaagtgcccactcaaggccatcctggctatgagaccctcgcatgcgtcccctgagagagaggagctatgatgatcccatcacaaatgaggaaaccagagcagggaggccaaaagactggtgtgtagccaggccaggcctctgtctcccacaggtgcatgcaaactttgatgccactgcccaaacccttcttccagtgacatcttatttgcaaagagaggtcagaacagctctaagaggctgagcatggtgactcatgcctgtattcccagcactttgggaggctatggcaggaggatcgcttgagtccaggagtttgagaccagcctaggcaatatggcgagacctcatctctacaaaaaatacaaaaaaacaaaaaaattagctgggcacagctgcacacctgtggtctcagcaactcaggagaccgaggtgggaggatcatttgaggccgggaggatcatttgaggccaggagtttgagacctgcctgagcaacatgggaagatcccatagctacaaaaaattttaaaaattagccaggcatggtggtgggcacctgtggtctcagctacttgggaggctgaggtggaaggattgcttgagcctggagggttgaggctgctgtgagctgtgattgtgccactgcactccagcctgggcaacagaatgagactctgtctcaaaaaataaaataaaaccaaaaaaagaagctctaagagctgctctggtgggaaggagtttggggggacagaggcctccttgcatggcttaagcacccctgccctagtgataccccaagtcccatccagaaaccttggggggcatggcagccctgtgccttcacacccagggtctaggctatctgaacaactctgagaggagttttcaggacacacgagcgcggcacttaccagagacagtgaccacgatgtactgctggggtgcaggcgaaggggtgggtgcaccggttggctgcgagggtgcgggtacagccgggagctccgtcacgtactgcttctggccacccggtggctgtgcctggggctgggggctctgcagctcggtgacatattggggctgaggggtggcagcagcggtgggtggctgcgggggctggggtgccgctgggggtggtggcggtggcggctggggctgggcttgtggcggggcctgtggcggctgggatggtggcggggctgcctgtagctcagtatacgcctgtgttgccatgccaacggtggggaaaatgataataaataaggcttttttttttttttaattccttgggaagaaagacggggatgggggagagaaaaacaaaacaaaacaaaagaaggaaaaacaggaattaatccacaggcagagaaagcagggacagctctgggttccctggagatgtgcttgggttcatcactaacttaattaaatccccaggctggtggccagaaatatccaacccgtcactgcagggggaccagctgtagaccagggctggagccccactccgcacccccactcaccccaagccaggactcctgccttcccagtccctggtacccagagacccccacatccacataggatcgcatttccccacactgcgggggaacttgggcctgtgtggttgctctgtgccctcacccagagaaaaatggtacggttctcactgggtcactctcaactaccaggggctgccccctcccttgcctccatctccttagctgaggaccccaagtgggcacttcctgagggctcttgtaggccaggcacagggctgggcactttccctatgttagttcatctttttaaaatgtctattaggccgggcacagtggctcatgcctgcaattccagcactttgggaggccgaggtgagcggatcacttgaggtcaggagttcgagaccagcctggccaacatggtgaaaccccgtctctactaaaaatacaaaatttgctgggcgtggtggtgcatgcctgtagtcccagctactcaggaggctgaggcaggagaatcacttgaacctgggaggcggaggtggcagtaagccaagattgcaccactgtactccagcctgggagacccaagactctgtctaaatatatatgtgtgtgtgtgtgtgtgtgtgtgtgtgtgtgtgtgtgtatttttttacttatatattgaaatctacatgtacatatatatacatatatagtatatatatacacacacatatacactgtatacatatatgtacacatgtatatatattgtatatgtatattgaaatatacatacatatatatatatatatatatatatatatatatatatatatatataatcatttttttcagagatgggagtctcattatcatgcccagtctggtcttgaactcctgggctcaagcaatcctcctgccttagcctcccaaaaagtgctgggattctaggtgtgagccaccacgcccggcctatttcattttaaactttccaacaaccatgtctgggtttgggttctgtctgctagatagggagctgaggctcagagaggttaaggtgcttgccccaggccacacagcggggaagtggtggcagggctgcatttgaactctgggtgttctatgctcctgactcgtcagtttattgccggaaagcagagtcatggggaaagctgcctcccagggacccgtgccagttccctacgtgcctgccatctggacttgggattctcggctgagtagcattcccagtgggaaggtgttttgagtccaaaaagcccctgtgagctgcatggggccacaggggctttttgggccctctgtctgggagcagttatgggtcttgacaccagatgtaagctcatcagtgggacagtgcccttctgtggccaggggtgacagggctgggagcaggcccaggctgcactgagaacctggcagctgcggctgacttcagaacagggccggccttggccaagcgcagtggctcacgcctgtaatcccaacactttgggagaccagggtggctggatcacctgaagtcaggcactcaagaccagcctggtcaacatggcgaaacccagtctctactaaaagtacaaaaatcagctgggcatggtggcacatgcctgtaatcccagctacttaggaggatgaggcaggagaatcacttgaacctgggaggcggaggttgcaatgagccgagatcttgtcactgcattccagcttgggcaacaaagtgacactctgtctccaaaaaaaaaaaaaaaaaaaaaaaaaaattaaacgggagtggtggcgcgcacctgtaatcccagctactcaggaggctgaggtgggagaattgcttgaacccaggaggcagaggttgcagagagctgtgagccgagattgttccactgcactccagcctcagtgacacagcaacaccctgtctcagagcaaaacaaaacaaaaggaaagaacagggcaggcctggctgttaaagggtgtgttcctctcccaggtgctgggctgggcatggcctccctccggctcagccccactgtagcaggggatcggcagatggtttggggacccttgtactcataagccctatccccaggtccaaagcatttgagggacagtgggacagaggcacgagtggttaagaggaaaggctccagatccgtgcttttgtggctcctgcctggccccagaaggcatttgggtctgagagccctgcctgcagctggccatgactccgggcagtactgcctcctggctagcaactggaccagagcctcttctgcactaacactcagcacccatgtgccacgatgtgcccagatggccctccagccgcagggtgaccctcaaaggaaggaggaggtaaaaaacaactgctgttggttgaccaggagcccccagacccctccactgaggtcacctcctcctggcagtcgtatgagggaggcatcatcatgcccattttacagatgagctgagcgaggctgaggggtaggctgctgaaagcctcgagcaactggtgaggggggattgaacccaggtctctctgacccccagatacattctgtcagtccccaaccctacttaggatgccaggcacagggctcatttgcttttttttttttttttttttttgagatggagtatcactctgtcatccaggctggagtgcagtggcacgatcttggctcactgcaacctctgcccccacgggttcaagtgattctcctgcctcagcctcccgagtagctgcgactacaggagcctactaccacatccagctaattttcgtgtttttagtggagacagggtttcaccatgttggttgggcaggtcttgaactcctgacctcaagtaatccgcccacctcggcctcccaaagtgctaggattacaggcgtgagccaccgcgcccaaccttcatttgcttcttaaagtaagtacacggcatcttgccggtcttccaacagggagacccaagcgtcacctgcaaaggttacgccccctgcccaaggccgcagttaagggcagcagaactggcaagggggaagccggcccaagcagcccaggggaggctggttcccatccttcacgcctccctgtgcctccctcccccgggatccaggttctgctcttggatgccaaactcaagaggtgtccgagttagcaggggggcaaggtaggtaagaaacgagccctggacggggatggatgcaccacgatttgaatttggctatctcctaactgtgtgacttttgaggagagcccctacggctccatctgtgaaatgggaggacggctggccctaccaggcggggctgctgagggttcaagctgatcctgtgggcagtgtgtggccaggcacctggcatgctgtaagcacgcaggaaatggctctggctccttcactgcccagggccctttaacgcagttccaggaaagatgaaaataccttctggccctgcctgctgccttccagcctccagagctttgtgctgctgaggatgaaggaaacaggagcttacacttgcctcttggatgtgccctctgggcttgcggcaggcttgggagggactccaggaccctcctggctggcaggaacagagctgacagggccctggggccaccctccctgccaggtgaggtcattctggtaggagtggaggcaggcaggatgagaagccgtttggggccttcccacctagcaggtggccagccttagtgctccgaggcccagggactcgggcagcagagaaacttgcccaccgtgagagggaaaaggctgctgcctgccttgaacaaggcgaagaccatcctcctccagcccctgccctccccaaactcctttctgccagcattagaggggtggaggttcctcacaccatcgggtccaaatctggcccagctcgggtactcaagtcactgtagccgacgacccttcatctgtctggtgtcagaccctcacccacatgaaccctggcgctatgtcttaactcattaacatattaccaaccttcttctgggcctcagttgcctgtcacctggggataacgagaacacccaattcatcaaattgctgcaaagatccaatgagatcaggccgggcacggtggctcacacctataattccagcactttgtgaggcctaggcaggtggatcagctgaggtcaggagttcgagaccagtctggccaacatggcgaaaccccgtctctataaaaatacaaaaattggccaggtatggtggcgtgtgcctgtagccccacctattcgggaggctgaggcagaagaatcacttgaacccaggaggcagagggtgcagtgagcagagatcacaccactgcaatccagcctgggtgactgggtgacagagcaagactctgtctcaagaaaaaaaaaaaatccaatgagatcagctcagcacccaataaacactgataagtggcaggtgttattattcattcaacaaatatccaagccaggttgggacagaggaggaaggagacaggatcttcaagctcttgggaggggacaccaagaggaaatccaacctaagctttcgtcagcaacatcatgcagattcctgagctctactgcccagtgagtctgaaatggccccagagtctgttttagctggtcccttagatgattctgaggcagacagtcctgacagcactctgagaaatgctggccttggctttctcagccctaagagacctggccccttgtggcccctcccacaaagaaagggctttaaaagctcctcacttactggctctttctcctcctagggatacaaagcccatgggcctcatcccttccactcaggggcaagaagaggaggcaatgattaatttctaaaaggctgagctcaaaaggaggaggtgggagatcgaggaacaactaaaccaacttctctattggaggccttctcagcactgtgattgtcaatctttttcctacaattatttgaccaaagagcccttttctaccttttaaggagactacattaagcaattatacaggtttgttccctagagagaaataaatcacatatacatacatagcatgaggtattgcccatatatttgagcgtgagaaccctttctttatggagcctggcacacaaaacaagggaattacttaacaaactgttccttggcaatgaatctgccaagaaaagcactagtggctgcacctaccttcaaagccagcagctgcttatggagactgtttaaatctattactttaaatgagggctcggcaaagttctgtaagggccaagcagtaaacgttattagttttgtggctagtctctgcagcagctgttcaactctgccactgtaatgtgaaagtggccatgcacaataggtaaacaaatgagcaggctgtgtgcgaataaaactttatttctagacactgagatttgaacttcatgtaattttcacatatcatgaaatataattccggtgttgatatttccaataatttaaaaatgtaaaaatcattcttagctcaccagccaaaaacaggcagcaggccatagtttgttgaaccctgtgttttttttttgtttttttttgtttttgaggcaaagtttctctttcgttgcccaggctggagtgcaatggcacagtctctgctcactgcaacctctgcctcccgggttcaagtgattctcctgtctcagcctcctgaggagctgggattacaggtgcccaccaccatgcctggctagcttttgtatttttagtacagatggggtttcaccatgttagccaggctggtctcgaactcctgacctcaggtgatcctcccaccttggcctcccaaagtgctgggattacaggcatgagccaccgcgactggcctgacccctgttttggatgccagattctctaatcaaatggtttacatcctcagcaaggccctcccaaagatatagaaagaaaactcactctcttcatctatagaatggcttcaataatgaacttgcagaagaatggcaaaattaaatgggatgatgtgtgtttctctcatcctctatatccaattcatttagaagatttgtcaattactcctccaaaatatatcctagaggccgggcgtggtggcttatgcctgtgatcccagcactttggaaggctgaggcgggcggatcatttgaggtcaggagtttgaagccagtctagccaacatggcgaaaccccgtctctactaaaaatacaaaaattagctgggtgtggtggtgtgtggctgtaatcccagctactcaggaggcttaggcaggaggatcgcttgagtctggcggggcagaggttgcagtgagctgagattgtgccactgcatgcatacaaacacacacatacacatacacatacacacacacacactcgcacacatctcctaatgactgggcgcagtgctcacatctataatcccaccactttgggagtccaagattggaggatcacttgagcccaggagttcaagaccagcctaagcaacaaagtgacgccttatctctataaaaaagtgaaaaaatcagctaggcatagtacccgacacctgaagtcccagctgctcgggaggctggggtgggagaatcacttgagcccaggagttccaggcttcagtgagctatgatcacaccgccacactccagtctgggcaacagaacaagaccctgtctctttaaaatatatcctggacaggcatggcggctcacgcctgtaatctcagcactttgagagcccagggcaggaagattgcttgaggccagaagtttgagaccagtcttagcagcatagccgagactccatctcgacaaaaaaattttaaaaattaggtgggcgtgatggcgtgtgcctgtaatcccagctactcgggaggctgaggtagaattgcttgaacccaggaggcagaggttgcagtgagcctctctgcaaaaacaaaaaaaacaaaaaacaaaacaaaacaaaaaaatgctgcagatccattcctgcctctcatggcctcggccccacctcttcctcccacctggcatgctgtccccaccgccaccttcacggctggcttctcctccttattcaggtctcagctcgtacacacttccttgggtctgaaggtaccctcaagcacatactactattttatttgcttcctgacactgtgtttccctgttgagtttattttctttctttttcgtttcttagagacaaggtctcactctgttgcccaggctggagcacagtggcacaatcacagctcactgtaaccttgaattcctgggctcaagtgatcctccggcctcagcctccacagtatatgggaacgcaggcctgtgccacgacacctggctaatttttaaatctttttaagagatggggtctcgctatgttgcccaggctggtctcaaactcctgggcttaagtgatcctcatgtctcagcctcccgaagtgctgggattacaagcataagccactgagtctggctggatttattttcttcctcctagttcctcttccctccctgactggaaaggtaagggccccacaggcagagacctggtgggcctggtctctgtctcagctcctagaaaactgacaggcaaggccgggagcagtggctcacgcctgtaatcccaatattttgggaggctgaggcgggcagatcgcctgaagtcagaatttcaagtctagcctggccaacatggtgaaaccctgtctctactaaaaatacagaaattaggctgctgcggtggctcacacctatagttccagcactttgggaggccaaagcgtgtggatcacctgaggtcaggagttcgacaccagcctggccaacatggtgaaaccctgtctctactaaaaatacaaaaattagccgggcatggtggtgggtgcctgtaatcccagctactcgggaggctgaggcaggagaatctcttgaacctgggaggtggaggttgcggtgagccaagattgcgccattgcattccagcctgggcaacaagagagacactccgtctcaaataaaccaaaccgaaacaaaacaaaaatgagccggtcatggtggcgggcatctgtattcccaggtactcggatggctgaggcaagagaactgcttgaacccaggaggtggatgttgcagtgagccaagatcgtgccactgcactccagcctggatgacagagtgagactctgtctcaaaaaaaaaaaaaaaaaaaaattagccaggcatggtggcaggcatctgtaatcccagctactcgggaggctgaagcaggagaattgcttgaactggggaggtggaggttgcggtgagctgagatcacgccactgcactccatcctgggcgacagagtaggactctgtctcaacaaaaaaaagaaagaaagaaagaaaaaagaaaagaaaactgacaggcaaatagtgggggttttgactcttactgtccaggcagcataaatgatgcaccagaacacactgctagtgagcatcaaaggcaggttccagtctatcaactgctgagaccgtgtgagaaagttacttcctgccacaagcctgcttgtgctacagagccaggcaatgccttctggtccagaacaggcctgggaagcaggtgggagaaagtctttctcgcctaggaagaccacgtcctgtacagctgctattgaaggcagcatctctgcgggcggggcagcctggccatccccttccctgagatgctcaggtacatgacagaggagaagggtgaggacctcggctccagagacgccattccaagctccccaccgttcccacaatgtccacatccccgctcacccagctgcctcctggaaggcttgggactgtgtctgggcctgagcccaagtagcattttgtgtgtgtgttttgagacagtcttgctctgtcacccaggctcaagtgcagtggcacgatcttggctcactgcaacttccatctccacggttcaagggattctcctgcctcagcctcctaaatagctgggactactacagtcatgtgctaccatgcccggctactttttgtatttttagtagagatagggtttcaccgtgttggccaggctggtctccaactctttacctcaagtgatccacccaccttggcctctcaaagtgctgggggagtgagcacccaaattgagccactgtgcccggccaggatttttctttctagtgactctcctaaagccagagaacagccattcagcagccaggggagtgactttcccactacaaactggatccctggtatccagcttcctggatccctgtcatcgacccacacagcccagcaagcgagaagcaagtcaacctttaaagccacgagggctctcactggattcaaaatgataaaaataaaagccaacggtgtatttccgagggttgaacaggaagcgacaatcaccgtaacagcagaggctaacataactacattagcaattactttgtatttagttagtttcagcaattcctatgtatttgatattcaacaggtattattttctgggatccatagcacagaaacatgagattgaaaggactaccaaggattactgcccctagatgaaaggaagggaaactgaggcccagaaaacttaagtaactcacctaagagcacacagctagaaaagctgactgtttcaagtcagcttcaaatcaccctagtgttctcttcctagtcaaatgactcctcaggcccttcatctgtaaatgtaactggtgactgaggcagtcaacatgaccagataattggtaacatcactttctgctcagttagcttttttttttttgagacaagtctcactctgttgcccaggctggagtgcagtggcctgtgatctcagctcactgcaacctccgcctcccaggctcaagcaattcttgtgtctcagcctcccgagtagctgggattacaggcatgtgccaccacgcctggctaatttttttagaaacagggtttcaccatgttggccgggctagtctcaaactcctgacctcaggtgatccgcccacctcagcctcccaaagtgctgggattacaggtgtgagccaccacgcccagcctgctcagttagcttttttaagaagggctagccgggcgcggtggctcacgcctgtaatcccagcattttgggaggccgaggcaggtaaatctcgaggtcaagagatcaagaccatcctgaccaacatggtgaaaccccgtctctactaaaaatacgaaaatcagccgggcatgatggcgagcgcctgtagtcccagcgactcaggagactgaggcaggagaatcacttgtacccgggaggcggaggctgcagtgagccaaaatcaagccactgcactccagcctggccacagagtgagactccgtctccaaaaaaaaaagtgctgatgatccgtctagcaacttggcatttctagcttttttgtttgttttactgaaaattaatctccacctgtcctaactttcaaagagtccctgcctcctctaaaaagggccaggcctagaaaaagtacctggagaagttaggacccgccaacccccaccagaccaatctcaaactcttgggaaaaagcctgaaatgatccttttccttggaatgtattgactgatttaaaaggaaatggctgcagtttgcacaccgacactaagctcaaaagcaagacggagaataagccaactagacttggcctggctggctacttaaaaaaaaaattcctccccgagctggcaggatattgtcaccctaaaaagcagtggcaaagattctcctctcacaaacatggatagcttccccttccctctgaccgctcctgcccacgtggccctagaggctgggaccttgtcagtgacatgtgactcggttgacactcgtttgacacaaaaacatgtgtctggccaagagaagcgggtttaaaaaatctaagaaacttcctcaggcttcatttgctcccccattcccagtaggggagacctcgatgggcaggacccagaaacgttccatctccaggaacaaacccccgcaacctcaaaccaggaaacatcaggtctcaaacagcagcccagagaaaagcactcaggtttctgttcctctaaagcattccctcatggtcactcctccctaccatggactttgatttctgcaaaccagatcctccacgctaaagccaaatcgactcctagctcctccatgaaactttgcttcctctttgcttcctcccagagagaaggtggcaggtttaggagtgggctgcagtgttgaaatcaggactagctgacagttattttatcaaaccacattcagaaacggtagatacgaggaaaaggttcaaagataagccgtaagtaaaattcctggaaggaatgaggagtcccggtactgcaggaaaagggcgatgtcaatgattctccccattttacaggatggaaaactgaggcctcagatggacaggcacttgtccaagttctgagtcctgggacaactgcaaagctcttaaggaagaagggagtcgcttaaggatctggaaggcggaccgggtggtggctgcccaccctggttcccgaggtggaggttggggagacccagccggccccgcccataccttccctcctggtcccgcccacccaccttggccccgcctcgtacctccctcgctcccattggcccagcctccccaggcccgccccttcgcgctcccgacatataaaagccccccgccccggcctgccgacctccactcgccgcgggcctgcgagcgcccgcccctcgcgggggccgggccgcggggacgggggcgggtggtgtcgttccagccgggccccggccccctcccccacggtccagacagtcgccgccgccattttgaccgcccgccccttccccccggactgtgattacagagacacctactgccccggccccgccgcccaccccggcccggccagccaccccggggccgccctggttacctccgcttctccccacttctgtctgcggaaacgcttttcggaggtctcggagtcgatgttgggaaggggacgggacgtgctggggtccccgggccgggcctggggggtgggggtgggggtcggccgggcggttgttgttgttgactcgcgttgccgggttgcttggtcgccacgactaccgtggctatggcgcctccgtttccctcaccggggcaactgttgctacccaccctagttacgtcacgcgcgggggcggggcccggggtgattggcggcggccggagaagtgattggacggcgccaggccttgcagctaaactattagttccgatgcacgcttttcaacaccctctggacttcccggcgatctgatttatcagtatgaatgtccatcaaaagaaactgaaccctcaaaggcagccgggcccgtcactccggcagggaagcagctggttaagaataaaggggtaggactcgtgaggacgggattggtttgccgatgtaaaaccggcctcctggttcgactaaagggacgtcaatctaccaaaggtttgccgcgctctctggctggaggccgtgcgcatgctcggcacgcaaggccgattgggagttgtagtccgctcttgcgtacactttacatgtcttaccaaattaaaaaggcgagaaaggaagactccgctccagacttctctctcgctcggtgggccagtttctggcttcttgcgctgacgtcaggggaggaatgcagtgacgcagcgcagcccctctgtgacgacagcggcgaaggccggactcgggattcgatgacgtcactgggcgcgcgtcccccttccccactgcccatggccccgtcggggttgggtggaagcgggaggccgcggcggggttcgatcccagctcccacccgctggggtgacatcctcctccgcccaagccggccagacagcgcggccgccgcgccttctcccgcctcccggtcccctccagccggaaaaggtcaccgctgccggggtgaccgcggctatctctgccccgcaggcggtgcggccgccttgggaaaggtctctgcaaggcgggggacttcattcgcggcttcaaccgcggtagataagcaaaggtcagccccgacccagcccagggagcttggtccgcccaggagagctcaccacaacccccgccacacacacacacctcccacacatacgctcctctgtgcctcagtttcctcaagggactgtctgggtgctgcaggacgagaagagacagaaacagggcccggactagggtgaacatcttgggagcaaaaactcagtcatcaagataaataatcttctaattcaatatttgttaaatatccaaattaatgggaaaaaataaatctatgatgaacaaaacatcacaattttaaataaagacaggatccgccaacacagggattaaggtgagatgcgttatgcaagctcagggtcagatcttgtgtttaaaataaatttattattattattttttgagacggagtctcactctgtcgctgaggctggagtgcagtggcgcaatctcggctcactgcaagctccgcctcccaggttcacgccattctcctgcctcagcctcccgagtagctgggactacaggtgctcgccaccacgcccggctaattttttgtatatttagtagagacggggtttcaccgtgttagccaggatggtctcgatctcctgacctcgtgatccgcccgcctcggcctcccaaagtgctggggttacaggcgtgagccaccacgcccggcctactttttatgttttaaatgtcaattatcttatgactgagctctttggccttctcttaaattttgcattctcatcccaggtaggccctagaacagcaaggggaaaagaaaacaggctcagacagccctgaagtctaatgccagccctgctgtgtggcattcagaaagtgactccacctaagtttgtttcctaattcaaccaacattatatttcctcggtgcaaggccctgggctatacaagtgaagaaaggtgacttcatttatggtggctcacacctgtaatcccagcactttgggaggccaagcaaggaagattgcttgagccaaggagttcaagaccagccttggcaacaaagcaagacacccgtctctacaaaaattagctgggcatggtagtgtatgcctgtaatcccagctactccggaggctgaggtaggaggattgcttgaacccgggagggggaggttgcagtgaaccaagattctgccactgcactccagcctgggcgacagagcgagactttgtctcaaaaaaaaaaaagcaattagctaggcgtggtggcatgtgcctgtggtcccagctactctggaggctgaggctggcaggattggttcagctccggaggtagaggctgcagtaagcaatgattgtgtggtccagcctgagtctcagaaaaaaaagaaaaaaaggaaaaaaaagaaagcaaacaactccctttgcattctaggatgggatacacaataaacagataaattgtaagataggctccttagagtcctgagagcaacataagagagtggggtaggagaatgagaggatgctgtagccagtgttatctgaggggggatgtcccacagaatgagcctgagtggtgagagacgaagcaagcctcataaatccaggtggaggggccggtcatgatggctcatgcctgtaatcccagcactttgggaggccaagttcaggagttccagaacagtctggccaacacggcgaaatcctgtctctactaaaaatactaaaataggtcggtgtggtggcacgtgcctgtagtcccagctactggggaggctgaggtgggagaatcacttgaacctgggaggcagaggttgcagtgagccaagatcgcgccactgtactccagcctgggcaacacagtgagactccgtctcaaaaaaaaaaaaaaaaaacggggggagagaactgccttcaaagctgggaacaggaacttctgctaaagccaggagagataaggttgtagaggtaataatagccacataattcccagcgaacccagcaaagtgggacgctccccgctcttgacaggtgggcaatggatgcccagagagaggaagtaggtgccctctctgccagaggcgtgtgaaccagagcaactccatcttgaacaggaactgggtaaaatgaggctgagacctgctaggcttcattcctaaatggttaaggcattcttagtcacaggataagacaggaggtcagcgcaaaatacagttcataaagaccttgctggctgggtgcagtggctcatgcctataatccgaacagtttgggaggcggaagtgggcggatcacttgaggtcaggagttcgagaccagtatggaaaacatggcaaaacccgatttctaataaaaatacgaaaattagatgggcgtggtggtgggcacctgtaatctcaactacttggaggctgaggcaggagaatcgctcgaacccgagaggcagaggttgcagtgagccgagatcaccccactgcactccagcctgggtgacagagtgagactccatctcaaataaataaataaataaataaataaataaataaataaataaataaaaataaagacctcgccgggcgtggtggctcacgcctgtaatcccgtcactttgggaggctaaggtgggcagatcacgaggtcaggattttgagaccagcctggccaacatggtgaaaccccatctgtactaaaaatgcaaaaattagccgggtgtggtggcgtgcgcctgtaatcccagctactagggaggctgaggcagaattacttgaacccgggaggtggagagtgcagtgtgccaggatcgcgccactgcactccagcctgggtgacattgtgagactctgtttcaaaaaagataaaaattttaaaaataatttagaaaaatacataaataaagaccttgctgataaaacaggttgcagtaaagaagctggctcaaacccaccaaaaccaagatggccatgagagtaacgtctggtcctcactgctacactcccaccagcaccattacagtttacaaatgccatggcaacgccaggaagttactttatatggactaaaaacaagaggcatggaataatccaccccttgtttagcatatcatcaagaaataaggctgagtgtggtggctcatgcctgtaatcccagcactttgggaggccgaagctggcagatcgcttgaggtcgggagttcaagaacagcctggccagcatggcgaaaccccgtctctacttaaaatacaaaaattagccgggcgtgtggcgcatgcctgtgatcccagctactcaggaggctgaggcaagagaattgcttgatcccgggtggcagaggttgcagtgagccaagatcacaccactgcactccagcctgggcaacatggagactccatctcaaaaaaaataaaaaaaaatacagccctcgaggctgctctatggagtaaccattcttttattccttacaaatttgcttccactttacggactcacctggaattcttttttttttttttttttttgagacggagtctctctctgtcacctaggctggagttcagtggcacgatcttgactgattgcaacctccgcctcccaggctcaagcgattcttttgcctcagcctcccgagtagctgggactacaggcgagcgccaccacgcctggctaatttttgtatttttagtagagatggggttacaccatattggccaagctggtctctaactcctgacctcgtgatctgcccgcctcggcctcccaaagtgctgggattacaggcgtgagccaccgcaccaggccctgaattctttcttgcgtgatatccaggaaccctgtcttggactctggatcggacccccctttcctgtaacatctccaccccaagatcacgaagctggaggaaccagagcccatctcttttcatgggactttccagtgccctgggtgtgaccctggatgggagaagaggagaagcagcagctccagtctgcctggaattgccggttgagtcccagccctgacagtacctgcaagaattaatgagacttccaggcaggcagtgcccaagaatgaatcccagctggcaatacaagtcacatcagggtcccaggaccagccatggggacttcattgtggggagggaaactagaagccctatttccacctcctacccatttctccaatgcccagaagtagctggaccaagcccagagaccatgtcgtccatcaaaaatattcagctgggcgtggtggctcacacctgtaatcccagcagtttgggaggcctagactggcggatcacctgaggtcagcagtttgagaccagcctggccaacatggtgaaaccccgtctctactaaaaatacaaagttagctgggcatggtggtgtgtgcccataatcccacgtacttgggaggctgaggcaggagaatggctggaacctggaaggtggaggttgcagtgagtcgagatcgcgccactgcacgccagcttgggcgacagagagagactctgtctcaaaaaaaattcattataagactttgtggctggaaatgcaaggtggaggctgaaatgttctatatttttatctggtggaggttgtacagcatatagtcagccctccctgtatccacaggttacacattcattggaagattcaactaactgcaaatcaaacattcaaataggccgtgctctggtactggtataaaaataggcacataggccgggcgtggtggctgaagcctgtaatcccagcactttgggaggccaaggcaggtggatcacttgaggtcaggagttcaagaccagtctggccaacatggtgcaaccccgtctctactaaaaatacaaaaatcaggtgggcgcagtggtgggcacatgtaatctcagctattagggaggctgaggcaggagaatcgcttgaacccgggaggcagaggttgcagtgagccaagatcgcgccactgtactccagcctgggcgacagagtaagaccctgtctaaaaaaaaaaaaaaaaaaaaaaaagcacatagaccataaacccaaatacttaacagccaactggtcttcagcaaagcaaacaaaaacataaaaggggggaaaggacacccttttcaatagtaacgccaggataattggctagccacatgtaggagaatgaaactggatcctcatctctcaccttatacaaaaatcaactcaagatgggtgaaggacttaaatctaagactggaaactataaaaattctggaagataacattggaaaaacccttctagacattggcttaggcaaggatttcatgaccaagagcccaaaggcaaatgcaataaaaacaaagataaatttctgggacttaattagactaaagagctaagtaacagtcagtagagtaaacagacaacctacagagtgggaaaaaatcttcacaatgtaaacatctgacaaaggactaatacccagaatttaaaatgaatttcaacaaatcaacaagaagaaaacaaataatcccatcaaaaagtgggcttaggacatgaatagacatgtctcaaaagaaggtatacgaatgaccagcaaacatatgaaaaaatgctcaacgtcactaatgatcagggagatgcaaatcaaaaccacattgtgataccaccttaaactcctgcaagaatggccataatcaaaaaatcaaaaaaaacagtagatgttggcatggatgcagtgatcagggaaccctcctacacagctggtgggaatgtaaactagtacaaccactatggaaaacagtgtggggagtactcaaggaactaaaagtagaactaccatctgatccagcaatcccactactgcgtatctacccagaggaaaagaagtcattctacaaaaaagatacttgcacatacatgtttatagcagcaaaatttgtcattgcaaaaacgtggacccaatccaaatgcccatcaatcagcgagtggataaagaaactgtggatatatattcaatggaatactactcagccataaaaaggaatgaattaatggcattcgcagcaacctggatggacttggaggctattattctaagtgaagtaactcaggaatggaaaaccaaacatcgtatgttctcactcataagtgggagctaaactatgaggatgcaaaggcataagaatgacacaataggctttggggattcagtgggggaagggtgggaaggggctgagggataaaagactacaaatagggtgcagtgtatactgctcaggtgatgggtgcaccaaaatctcacaaatcaccactaaaaacatgctcatgtaaccaggcaccacctgttccccaataacctatggaagaaaaaaaaagttttttaaaaaaagaggccggacgtggtggctcacgcctgtaatcccagcactttgggaggctgaggtgggcggatcacgaggtcaggagatcgagaccatcctggctaacacggtgaaaccccgtctctactaaaaatacaaaaaattagccgggcatggtggcaggcgtctgtagtcccagctactcgggaggctgaggcaggagaatggcgtgaaaccaggaggcagagcttgcagtgagccaagttcgtgccactgcactccagcctgggtgacagagcgagactccatctcaaaaaaaaaagaaaaactcaaacagtccatgcttggtggctcatgcttgtaatcccagcactttgggagaccaaggtgggaggattacttgaactcagaagttcaagaccagcctgggcaacatagcaaaactccatctctacaaagaaaaaaaagtaatggaaaaaagttcaaataaataataacaggccaggcatgctggcttacgcctgtaattccagcactttgggaggcccaggtgggaggatcacctaggttgggagttcaagaccagctggccaacatggcaaaaccctgtctctactaaaaatacagcaattatctgggcatggtagcttatgcctataatcactttgggaggctgaggtgggtggatcaccagaggtcaggggttcaagaccagcctgggcaacatggtgaaaccccgtctctactaaaaatacaaaaattagccaggtgtgatggcacacccttgtaatcccagctacttgagaggctgaggcaggagaatagcttgaacccaggaggcagaggctgcagtgagcggagatcacaccactggactaccgcctgggcaactgggcaacagagtgagagtctgtctcaaaaaaaaaaaaaaaaaaaaaaaaaggccaggcatttttacttacttacttacttacacctgtaatgccagcactgtgggaggccaaggtgagtggatcacttgaggtcaggagttcgagaccagcctgaccaacatggtgaaaccccgtctctactaatattacaaaaatcagccaggcatggtgttgtgcgcctgtaatcccagctattcgggaggctgaggcaggagaatcacttgcacctgggaggcggaggctgcagtaagccaagatcgcgccactgcaccccagcctgggtgacaagagcaaaactctgtctcaaaacaaagaaaaaagagaaggaaagaattagaaaatcaccatgttgcaaaagccagcaaaatcattgatgcagacagcgatcatctataggtgctaaaaaaagtagatgaggccgggtgcggtggctcatgcctgtaatcccagcactttgggaggccgaggcgggcagatcacctaagatcaggagttcgagaccagcctggctaacatggtgaaaccccatctctactaaaaatacaaaaattagccgggcgaggtggcgggcacttgtaatctcagctactcggtaggctgaggcatgagaatgacttgaacccgggaggcagaggttgcagtgagccgagattgcatcactgcactctagcctgaacaacagagccagactccatccaaaaaaaaaaaaaaaaaaaaaatttggccgggggtggtggctcatgcctgtaatcccagcactttgggaggctgaggtgagcagatcacctgaggtcaggagttggagactagcctgaccaccatgccgaaaccccgtctctactaaaaatacaaaataaataaataaataaataagctgggcgtggtggcagttgcctgtaatcccagctactcgagaggctgaggcaagagaattgcttaaacctgggagttggaggttgcagtgagcgagaccatgccattgcactccagcctggtcaacagagcgggactctgtctcaaaaaaaaaaaaaattaaaaaaagaaggaaaaagatcaataatccaaaagtatactaggcaagggaggttaccagagagtacagaggaaactaatggtccttaaacacatgggactttgccctgccttgcttgtggtcaggaaaatgcaaattttctctactctgagatactatttttcacatgtcatgttggcaagaaaccaaagttcgataacactctctgttggtaaggctgtaaggcagcagaacttttacccattgctagagagagtgtgaatcgctctaacacctgagggggaatatttgtcaatatgcgtaaaaattacaaatgcacacagtctttgagccagaaatcccgcttcggaaaatttatccacagagacacttgcatatgtgtaaaatgacgttctgtatggcgatgtcagcctaagaacaaacgagtggaaaaaatgtccatctctgagagtgaaattaaccataaagcattcacacagcagcatgctatgcagctgtgaaaaaataaaaataaaaaataacaagaatgtggccaggcacagtggctcacgcctgtaatcccagcactctgggaggccaaggcgggcctatcacttgaggtcaggagtttgagaccagcctggccaacatggtgaaatcccatctctactaaaaaataaaaaaattagctgggcatggtggcatgcacctgtagtcccagctacttgggaggctgaggcatgagaattccttttttttttttttttttgagacggagtctcactctgtcacccaggctggagtgcagtggcgcgatctcggctcacggcaagctccacctgccaggttcatgccattctcctgcctcagcctcccgagtagctgggactacaggcacctgccaccacgcccagctaattttttgtatttttagtagagatggggtttcaccgtgttagccaggatggtctcgatctcctgacctcgtgatctgcccgcctcggcctcccaaagtgctggggttacaggcgtgagccactgagcccggctgagaattccttgaacctgggagacagaggttgcaatgagccgagttggcgccactgcactccagcctgggcaagagcaagactccgtctcaataaaaattaaaataaaataaaataaagttttgttaagagatctccaacacttgttaagtcacgtgggagaagcaacattcagaagaatgtgtagaacatgctaccttttaatgaaattctgggccaagcatgctggctcatgcctataatcccagcactttgggaggccgaggtgggaggatcacttgagcccagaagttcgagaccagcctgggcaacataataagacctcgtttctagtgagactggacaggatcttgctctgtcacccaggctggagtgcagtggcacaatcatagctcactgcagccgccaactcctgggctcaagtgatcctcccacctcagcctcccaagtagatgggactacaagcacacgccaccaccctgggccaaattttaaaaattcttttggagaaatgaagtctcagccaggtgtggtggctcatgcctataatcccagcactttgggaggctaaggtgggtggatagaaaggtcaggagtttgagaccagcctggccaacatggtgaaaccccatctctactaaaaatacaaaaatttgctgggcctagtggtgcccacctgtaatcccagctacttgggaggctggggcaggaggatctcttgaacccgagaggcgagggttgcagtgagccgagatcataccagtgcactccagtctaggtgacagagcaagactccatctcggaaaaaaatttttaaaagtccgggtgcggtggctcaggcctgtaatcctagcactttgggaggccgaggtgagtggatagcctgaggtcaggagttcaagaccagcctggccaacatggtgaaatgccatctccactagaaatacaaaaattaggccaggcacggtggatcacgcctgtaatcccagcattctgggaggccgaggcgggtggataacgaggtcaggagatcgagaccatcccagccaacatggtgaaaccccgtctctactaaaatacaaaaaattagccaggtgcggtggcatgtgcctgtaatcccagctactcgggaggctgaggcaggggaatcccttgaacctgggaggcggaggttgcagtgagctgaggtcgcaccactgcattccagcctggcgacagagcgagactctgtttcaaaaaaaaaaaaaaaaaaaaaaaattacctgggtgtagtggcgggtgcctgtaatcccagctactcaggaggctgaggaaggagaatcactttaacccaggaggtggaggttgcagtgagccgagatggcgccactgcactccagactgtgcaatgggagggaaactccacctcaagaaaaaaaaaaaaattcacaggggtagaaagtagtatggtggttgccaggggtagaaggaggaaggacggagagagtgtttaatggggacagagttttggttggggaagacaaaatgttctggagatggatgattgcacaataatgtaaatatgggtaatgccactgaatcgtacacttaaaaatagttaaaacagccggacacagtgctcacgcctgtaatcccagcactttgggagcccgaggtggggagatcccctgaggtcaggattcaagaccagcctggccaacatggtgaaaccccgtctctactaaaaatacaaaacacattagctggatgtagtggcgcacgcctgtaattccagctactcgggaggctgagacaggagaatcgctggaacctgggaggtggagactgcagcgagtcaagatggcggcattgcactccagcctgcgcaacaagagcaaaactccatgccaaaagaaaaaaaaaatgttaaaacggtaaattttacatgtattttgccacattaacaaaaaatgtttaggccaggtgcagcagctcatgcctgggcaaaatattgaggccctgtctctaaaaaaaaaaagaaaaaaaaaaacaagaaaaagaaaaatattggccaagcatagtagtgagctgaggtgggaagatggcttgatcccaggggtttgagactgcagtgagctatgatcgtgccactgcactccagtctgagtgacagagccagagccagacaaagccaaagagggaaaaaaatgggtttaacatactggcggggcacaatggctcacacctataatcccagcactttgggaggatgaggcaggcaggttgcttgaactcaggagtttaagaccagcctgggcaacatggtgaaaccctgtttctgcaaaaaaaaaaaaaaaaaaaatttagctgggcgtggtgacatgtgcctgtggtctcagctactctgggaggctgaggcaggaggatcacttgagcccaggaggtcaaggctacagtgagctgggatggtgctactgcacttcagcctgggtgatagagtaagaccctgtctcaaaaaataaataaataaataaataaataaagcaagcctaggagtttgagacctgcctggggcacatactgagaccctgtctctacaaaaaatttaaaaatgagctgagagtggtatgcatctgtggtcccagctactcaggcggctaaggtgggaggataacttgagcccgggagatcgaggctgcagtgagccgtgatattgctgctgactctagcctgggcaacggagtgagaccctgtctcataaagaaaaaaaaaacctgtattcatatttgttttcatgtgtacaaagtaattctggaaagatactcaggaaattaagagctgtggttattcatgagagaaaggggaggaactgaaacttggaaggcagatgctgcttcataaaccttatatgctttgctttttgaagcatgtaaatgtattaactattcgaagataaattaaatagtttggagaagctgagggcagtgatacagacctctaatcccagctatttgggaggctgaggtgggacgatcactttaggaaagggaactaagaccagcctggcaacacagcgagactccagtctcttaaaaaaaaaaaaaaaaaaaaaaaaaatatatatatatatatatatatatatatatatatatatatatatatatatatatttattgtattgctgggcacagtggctcatgtctgtaacctcagcactttgggaggctgaggcaggtggatcacttgaggccaagagtttgagactaccctggccaacatggtgaaacaccatctctaataaaaatacaaaaattagccgggagtggtggcgggtgcctgtagtttcagctactcgggaggctgagacaggagaatcacttgaacccaggaggtggacattgcagtgcactgagatggtgccactgcactccagcctggatgacagagcaagactccatctcaatatatatataatatatatttatatataatatgttaatatattgtatacatacatatatgtatacaacatattaatttatattaaggtaatatattatattaattaattatattatactaattaaattatattaatataagatgtattaatttacatatatttctgtatacaatatattaatatattataaaaatgttacattatgtcctaggctatatttatatgtgctatatttatattatataaataatatatcataaaaatatgttacattatgctatgtatttattttatatagcataatgtaacatataatatataatgtatatattacatattatatattatatattttttgtatacttttttaacatgtccccagagataggaaatataaatctatattatacattatataacatatttatattacatattatatattatatatcataatacattataatatattaattataatataatatattaatatattataacatattctataaataaaatatttatatattatataaatatgttatataatatgttatatataaatgctatgatatattgtataacataaatataaaattatatctcatataatagattatacatgatatataatatacattatatatcatatacattatatatcatacatgatatataataattatatttaatatataatgtatatttttataataattacatataacacatatatttatatattttatatatatatatatatatacagtctgtatcttcaactgttttgtttttttaaaaggacactcataattggatttagggcccacccagataatccaggatgagcttatcttaatataatataatatataattttatattatatattatatattgtattataatataataaatatataaatattttattatatattttataatatatattatatatattatatatataaaataaatatatatattatacataaatataaatatatataatatattatataacctatttatattatatatataaatatataaatatatcatatatatttatgtagaatatatttatatattataatatactatattattataattataatatatttatatataaatatataaatgtatttctatataatatataagtatattatataatagaatatagtataatatataacatctataatatataagtatacttatataatatatattatacaatatataagtatattatatatgtttatataatatataaacatattatataatatgtttatatatgatatatgcatattatgtttattatgatatatgcatattatataatatgtttattatatgatatataaatatatttatatgttatagatgttatgtatattatagatatattataatttataaatgtatatcataataattttataaacttataaatatatattatatatataaagtttggaaatcagggctttatttagaattggcaaaattggcttgcatttttatagtgaacaaaatcatcatgacacccatattcctagcaggtgacatttcccgttctgactatattcatttcactgtagctgctgtaaccagtgtccacaaaccaggtggcttacaccaatgaacatttattcccttcctgttctggttgtcaggagtctgaaatgcaggcgtcgcagggccgcgccccctctgaggcctctaggggagggtccctccttgcctcttccagcttctggaggctccaggccttccttggcttcctcaatggcattaagccaatttctgcctctgtcttcatatgaactttcctcttttgtctgtgtcttcaactcttttgttttttaaaaggacactcataattggatttagggcccacgaagataatccaggttgagctcatcttaaggttctttttaatttttttttaatggagtctcactgtgttgctcagactggagtgcagtggcatgcgatctgggttcaatgcaacctccgactcccgggttcaagcgattctcctggatcagcctcctgagtagctcatattacaggtgcccgtcaccacacccagctaatttttgtattttcagtagagaccgggtttcaccatgttggccaggctggtctggaactcctgacctcaggtgatctgcctgcctcagcttcctgaagtcctgggattacaggcatgagccaccccccaaggccatctaaagattcttaattacatttgcaaaagctctttttctttttctttctttcttttttttttttgagacagggtctcactctgttgccgaggctggagtgcagtgacaccatcccagctcactacagtctcaaattcctgggctcaagcgatcctcccacctcagcctcctgtgtaggggactacaggaacacaccaccatacccagctaatttttgtatttgtagagacgggagtgtcactgtattgtccaagctggtgtggaactcctggcctctagcaatcctcctgccttggtcttccaagtagctgagaccacaggcatgcatgcctggctaatattttctattttttaaaggccagatcttgacattttgcccaggctggtcttaaactcttacgctcaagtgttcctccggcctcagcttcctaagtagctggaaatacaggcacacatcacctcacctggctaaggttttgttttgttttgttttaagataggatctctgtcacccaagctgggtgacacaatcatggctcactgcagccgtgaccttctgggctcaagcaatcctcctgcctcagcctcctgagtagctgagattacaggcacctgccaccgtgcctgactaatttttttattttttagtagagacagggtttcactgtgttggccaggctggtctcaaactcctgaccccaggtgatccgtcctccttggcctcccagtgtgctgggattacaggtgtgagccaccgcacttggtttcaaatacttttttctagtaagatcacatttatagatcccagggtttaggatgtggacatagatttctgcagatcaccatttacacaccacaccgacgagtgctgtgcagaatgcttaggactctatagaatttcaccaaagtccccaagaggctcatgaagcaggtatacttatcatctccatcttcacaatgaactcagagaggtatagggtcttgcccaaggatacacaggaacagagatttgaacctagctatgttgggcccaaaactctgattctatgtgagacacaaaagacgcttctgggctgggtgcagtgactcacgccagcactttgggaggctgaggtgggcagatcacttgagatcaagagtttgaggctagcctggccaacatggcaaaaccccgtctctactaaaaatacaaaaattaaccagacatggtggcgcacacctgcagtcctagctacttgggaggctgaggcacatgaatagcttgaaccctggagacagaggctgcgatgagccgagatcactccattgcactccagtctgagcgacagagtgagaccctgtgtcaaaaaaaaaaaaaaaagaaaagaaaaagaaaaaagaggcttctggtttgaggcccatcagttaagtcaggcaggcaggcagcagatatttcctgaatgcttgttcttccccaggccaggcactgggggcgcaggagaaaagggcaggagggtacctccctacaggaagttcctggagaagaggccgaggggaagagagtattattcaccagccctttagaaacagagcaatcagaggtgacctctgcctccggaaggttgcccttggcctgtgacatccacagcaggcaactggggccaggagtttgtgacagagaaaaggacaaagagatgaagttctaatccaaagggaacgtgtccagtagaaataacatttaaacagcacttacttcatgcaggagattgttgtaaaaatttgactcactcattaaatctttcccattttgcaagtgaggaaaccaaggcacagagagtttaagtgacttggccaaggtcacacagcaggaaagaggcagaggtggaatttgaagccaagcttgccccccttaccagagcccttgtttttgctgtgttttaaagtcgaggtgaaattgacattaacatagctgtgcctggtggctcatgcctgtagtcctagcactttgggaggccaaagggggaggatcacttgagctcaggagttccagatcagcctgggcaacatagttaggcctcatctctttaaaaaagaaagactggccgcagtggtttacatttgtaaaccacctgtttcccacctggctaatttttgtatttttgttagagactgggttttacactacggtggacaggctggtctcaaactcctgaactcaagtgatctgcccgccttggcctcccaaagtgctgggattacagacgtgagccaccgtacctggcctggttagttttattttatatggatgttatctctctctttttttttttttttttgagacagagtttcgctcttgttgcccaggctggagtgcaatggcgtgatctccgctcactgcatcctccgactcccaggttcaagagattctcctgcctcagcctcctgagtagctgggattacaggcatctgccaccatgcccagcaaatttttgtatttttagtagagacgggtttcaccgtgttggccaggctggtctcaaactcttgacctcaagtgatccgtcctcctcagcctcccaaagtgctgggattacaggcatgagccaccatgcccggcctcaattttttttttttttagacaaggtttggctccgttgtacaggctggagtgcagtgatgcaatctcagctcatggcagccttgaacgcttaggcaaaagtgatcttcccacctcagcctcctgagtagctgggatcacagatgtgtgccaccacacctggctaatttttacattatttgtagaggtggggtttcacctgttgcccaggctggtctggaactcttgggttcaagcaatcctcctgccttggctgcccaaagttccggaattacaggcgtgagccatcattcccagcctctcaatatatatatttttattttattatgatgatgatgattattttttgtgacaaagtctcactctgtcgcccacgctgatgcacagtggctcaatctcggctcactgcagactctgcctcctgggttcaagtgagtctcctgcctcagactcctgagtaactgggattacaggcatgtgccaccatgcccagctaatttttgtactattagtagagatggggtttgaccatgtcggccaggctggtctcgaactcctgacctcaagtgactcgcccgcctcagctgcccaaagttctaggattacaggcatgagccactgtgcctggccactgccactaattttacattatggtgagttgtatgattatttcaatatacaactacagtataataataatagaaataaagtgcacaataaatgtgatgcgcttggccaggcgcggtggctcatgcctgtagtcccagcactttgggaggccgaggtggacggatcatgaggtcaagagatcgggaccaacctggacaacatggtgaaacctcgtctctactaaaaatacaaaaattagctgggcgtggtggcatatgcctgtagtcccagctactcggaagctgaggcaggagaatcgcttgaacctgggaggcagaagttgcagtgagccaagattgcgccattgcactccagcctggtgacacagcaagactccatctcaaaaaaaaaaaaaaaaaaaaaaaaagtgatacgcttgaatcatcccgaaaccatccacttgacactccatccatggaaaaattgtcttccacgaaaccggtttctggcgtcaaaaacgttaggatctgctgcctcaggacacccttctgtgtctccgtttcctcatttgtaatatgagaattatcttagtcctgaattcataaccccatgctcttaaaagtgtggtttccgccgggcgcagtgtctcacgcctgtaatcccagcactttgggaggtcgaggcgggcggatcacgaggtcaggagatcgagaccatcctggctaacacagtgaaaccccgtctctactaaaaatacaaaaaattagccgggcgtggtggcgggcgcctgtagtcccagctactcgggaggctgaggcaggagaatggcgtgaacctgggaagtggggagcttgcagtgagccgagatcatgccactgcactccagcctgggcgacagtgcgagactccatctcaaaaaaaaaaaaaaaagaaagaaagaaactgtggtttctgggctgggcgtggtgctccaggctggagtgcaatgacacaatcttggctcactgcaacctctgcctcctgggttcaagcgattctcctgcctcagccttctcagtagctgggattacaggcacccgccaccatgcccggctaatttttatatttttaatagagacagggtttcatcatgttggccaggctggtctcaaactcctgacctcaggtgatccacccgcctcgacctcccaaagtgctgggattacaggtgtgaaccactgtgtccagccaatcccagcacttcgagagtctgacgcatttgggtcccttgagtccaagagtttgagaccagcccgggcaacattgtgaggtctcatctctacaaaaaatacaaaaattagctgagcatggtggtacacacctgtagtcccagctacttaggaggctgaggtgggaggatcatttgaacccgggaattcaaggctgcagtgagctatgttgccaccactacaatccagcctgggcaacatagccagaccctgtctctgaaaaaaagaaaaaaaaaaaagtctggtttctgaaccagcaggatcaatgtcacctgggaactggttggaaatgcagattcttagatatgttccatacctgttgagtcaggagctctgcaggtaggacacaaagatatgtgttttgtttgtttgtttttgagacagagtctcactctgttgcccaggctgaagtgcagtggcgccatctcagctcactgcaacctccacctcccaggttcaagcaattctcctgcctcagcctcccaaggagctggggctacagacatgagccaccacacccggctaattttttgtatttttagtagaggcggggtttcaccatgttggccaggctggtctcgaactccggacctcaggtaatcctcctgccatggcctcccaaagtgctgggattacaggcgtgagccaccgcgcctggcctgatttctgttttaacaagcctacccaaagattctgaagctcactcacatttgagaaccattaccctgggttgttgggagaatcaaatacattacagagatataaaatgctttgagcagctgagggctgtggctcatatctgtaatcccagcactttgggaggctgagacaggcggatcacctgaggccaggagttcgagaccagcctggccaacgtggtaaaaccccgtctctactgaaaatacaaaaattagccaggtgtggtggtgggcgcctgtaatcccaactacttgggaggctgaggcgggagaatttcttgaatctgggaggcggaggttgcagtgagccaagattgtgccattgggactgtacctctagcctgggtgacagagcgagactccatctaaacaaacaaacaaacaaataaacaataaaatgcttacagtagtgtgcctggcctcgtagcacatactgcactgggcgttcactgctattatgatcttcgaagaggtccaggaccctaacgttgtggggatctggttgtgtcaccttaccccgccttttgggattatgcgtttctggtctctgcaggttggagaccttctcgcctctctgtcaatgatgttgacaataagctgggccacatcaccctgtccctagcgaaaggttatcacttcgctggggacatgagaaaggtcgggttgggggggccgtgcctgtctcccctctgctggagaagataagggaggcactcagctttcttcaggcagagtgtgggggagccacgatgtataaatggggggccaagaggcagcagagacactggcccactctcacgttcaaagcatctccgtccagcatggccaggtacatgctgctgctgctcctggcggtatgggtgctgaccggggagctgtggccgggagctgaggcccgggcagcgccttacggggtcaggctttgcggccgagaattcatccgagcagtcatcttcacctgcgggggctcccggtggagacgatcagacatcctggcccacgaggctatgggtgaggctggggagagagtggatgtagaaggggaacaggtggctggatgggtcccaggagctaaggacagagataagaggaggttgctggaggaggagggtccctgtcctgccacattcagccagggacacctgcccagccttgaaacaagggctcaggagttagcagagctgcagagctgggatggggtgttgcaagccatccatgggggctggaagtctgaggacaggtgggggcggggagcgtgccatttgcaaagacaacaccgaagtgttttccaaccctttccagcaggtaatgtgaagggtgtggtatacacatagctgggtttgtcacctaatgcatgacctctccccagcaagttggtttttcttccgtctctgagtgtcttttttttggagatgtggtctcactccattgcccaggcttgaatgcagtggcccaatcactgctcattgcagcctcgacctcccaggctcaagtgattctcctgcctccgcctccagagtagttgagaccacaggcacctgacaccatgcctggctagttttaaattttttttttgtagaaacaggggtctcactatgttgcctaggctggtctcgaactcctgggctcaagtgatcctcccacctcggcctccctaagtgctgagattagagtctctgagtgtctttatcttcaaatgggagacacagttcctgaatcttgcaggattaagtggtatgattaaatcaaaacagattagggcagagtctcagcagggcagcggcacaatctgggatccatcaggagagtcagagggaacagaagacctagcttcatgaggggcagggacctggcaaatagatattcatgatggtgagaaggaggataggtatgagcgtggacatagaagacacaccacttggattcagatagtagctctacaatgtaatagttgtgtgttcatgtgctactattttttttttttttgagacagaatctcattctgttgcccaggctggagtgcagtggtgcaatcttggctcactgtaacctccatcacctgggttcaagcgattctcgtgcctccagcctcccaagtagctgggattacagatgtgtgccaccatacctcgctaatctttttatttttagtagagacagtttcaccatgttggccaggctggtctccaactcctgacctcaggtgatcctcccacctcagcctcccaaagtgctgggattacaggcatgagccaccgcgcccagccatgcaaattctttactgagtcctgcctcagtggtctcctctggaaaatacgggtgataactgcacccacctcaactggttatcactgagaagaataaagaagttaacctgctaaagcacttaaaacgttgtttgacacaaagtaagtgatcaataaattattattattattattattattattattattatttttgagacagggtcttgctctgttgcccagactggagtgcagtggtgtgatcacagctcactgcagcttcaacctcttgggctcaagcaattctcctgcctcagcctcctgagtagctgggactacaggcttgtgccaacatgtctaactttttattatttgtagagacagggtagtgctgtgttgtccaggctgttcttgaactcctggttctggtgatcctccagcatgtgcccctggaagtgctgggattacaggtgtgagacaccgtgcccggactcaatagtcatttttgagtgctcatcatgttccagacattgttctaagtttttttttttaatgaatattaactccttataaaacttgagaaggttggagtaattatttttttccactttgcagaaaagaacattgaggctccaagaagtaaatttacttgctcacgattagagaagctggattcatgctcagtcagcccagctcccaaatgtaccaggtcctcaattaataaagagtaaggagaaataaatgacagggctgggtgcggtggctcacgcctgtaatcccagcactttgggtggctgaggtgggcacatcacttgaggtcaggagtttgcgaccagcctgaacaacatggtgaaccccatctctataacaatacaaaaatcagccaggcctgctggcagacacctgtaatcccacctactctggcagagccagaatttgaacccaggactgggtggaataaaaactctgaactatgtctatgactgttgtcacaagatcagagctagactggccaggagccatgactgtgggtgcagcagcagctgagccctgatcactaactctgttcatcttttgcaggagataccttcccggatgcagatgctgatgaagacagtctggcaggcgagctggatgaggccatggggtccagcgagtggctggccctgaccaagtcaccccaggccttttacagggggcgacccagctggcaaggaacccctggggttcttcggggcagccgagatgtcctggctggcctttccagcagctgctgcaagtgggggtgtagcaaaagtgaaatcagtagcctttgctagtttgagggctgggcagccgtgggcaccaggaccaatgccccagtcctgccatccactcaactagtgtctggctgggcacctgtctttcgagcctcacacattcattcattcatctacaagtcacagaggcactgtgggctcaggcacagtctcccgacaccacctatccaaccctgccctttgaccagcctatcatgaccctggcccctaaggaagctgtgcccctgcctggtcaagtggggacccccccatcctgacccctgacctctccccagccctaaccatgcgtttgcctggcctacacactccactgccacaactgggtccctactctacctaggctggccacacagagacccctgcccccttcccagtccaaactgtggccattgtcccctgaccagctaaaatcaagcctctgtctcagtccagcctttgcacgcacgcttcctttgccctgctttccatcccctctccctccaactcccctgccagagttccaaggctgtggaccccagagaaggtggcaggtggcccccctaggagagctctgggcacattcgaatcttcccaaactccaataataaaaattcgaagactttggcagagagtgtgtgtgtgtgtgtatggttgttgggcgtaggacaggtttcggggatgcgcggtacgcggtaccacccctcggaggcccccacccccagacgcccaggccgcctccccactccccctcaagcagccccagccggggactttccgtcgcggggaaggggcggggaccctgagcgaaaggtgcggaggcggcctgccggggtggttcggcttcccgttgccgcctcgggcgctgtacccagagctcgaagaggagcagcgcggccgcgcggacccggcaaggctgggccggactcggggctcccgagggacgccatgcggggaggcaggggcgcccctttctggctgtggccgctgcccaagctggcgctgctgcctctgttgtgggtgcttttccagcggacgcgtccccagggtgagtgctggagggagctcgtgtcccgggcgctgccgctgcgctccccgcgaaggcgccagtgctccaggataagccacgcgtatgcagagcgaacggtagaggtgcaggcgccactcggctcctcccggggcagggacccggcgacactggggaatgggcggcagcgaggtcgaaccggagccccggggcggggtgggggagctctctgggtggttaacaggatgtggcgagcacagggaaagggggggtttgcacggagcccgggcaggggtgcctagcgcctcccttcctgctgctcatttccctaagcccccccaccttgcaattgtcagaagtccaagttctggggtgtgcaggcggaagggggggattcgaccccctttcctgagaccctctgactccctctccaggcagcgccgggccactgcagtgctacggagttggacccttgggcgacttgaactgctcgtgggagcctcttggggacctgggagccccctccgagttacacctccagagccaaaagtagtgagtacagggaggtgacgtggggaaacaggctttggaggtggccgctcaggccccaggctgctttggttgaaaggttccaggagtcaagcctggccaacatggtgaaaccctgtctatactaaaaatacaaaaaaaaaaaaaaaaaaaaaattacccaggggtggtggcgcgcgcctgtagtccctgatactcaggaggctgagacaggagaatcgcttgaacccgggaggcggaggttgcagtaagcccagatctcgccactgcactccagcctgggggacagagggagactctgtctcaaaaaaaaaaaaaaaaaaaaagaaaagaaaagaaaagaaagtcccaggagtctgcccccctcccccaatactcctccactccttcaattctagcttccctcgtttctttgctgtgtcaccctgggcaagtcactttccctctttgagtctccttttcatttctctattaaatagcaatcatagggccaggagaggtggtttgcacctgtcatcccagcattttgggaggccgaggcgggaggatcgcttgagcccaggaggagttcagagttttagagagcccgtcacttttttttttttttttttttgaaacggagtttcactcttgttgcccaggctggaatgcaatggtgtggtctcggctcactgcaacctccacctcctgggttcaagcgattctcctgcctcagcctccagagtagctgggattacaggcatgtgccaccatgcctggctaatttttgtatttttagtagaggggggaggtttcaccatgttggccaggctggtcttgaactcctgacctcaggtgatccacccgcctcagcctcccaaagttctgggattacaggtgtgagccaccgtgcctggccgagagcccgtctcttaaaaatataaaatataatataaataaagggaaataggccaggcgcagtggttcacacctataatcccagcactttgagaggccgaggtgggcagattacttgaggtcaggagttcaagaccagctgtagtaattccagctactcgggaggctgaggtgggaggatcacttgaacccaggaggcagaggttgcggtgagctaagatcgtgccattgcactccagcctgggtgacagagtgagactctgtctcaaaaaaattttaaaaaataaaagctggcgtggtggctcacgcctataatctcagcactttgggaggccgaggcgggcagatcacgaggtcaggagttcgagaccagcctgaccaacatggtgaaaccctgtctccactaaaaatacaaagattagccgatgtggtggtgcatgcctgtaatcccagttactcaggaggctgaggcaggagaattgcttgaacccaggaagtggaggttgcagtgagctgagatcgcaccactgcactccagcctggccgacagagcgagactccatctcaaaaacactaaaaataaaaaataaaaaagggaaataataacagaacctgcctccgaaggttaagtctgaggattcaaagagttaggtgcttggcaaggagaaagttgcttcataatgtgaacctggtttttattgctgtgtgacattaggcaagtcacttaacctctctgagcatgttaaaagattattcagtgtggtgctggggatgctgcagtgaaagaggtagacagaaagccctgcccacagtccaaggactccatgtgtttcttcatgatgaatcatacctggaaactcataatttcaaattgggctaagtgagggaagaggaaaagagtcaatgaaagataagaatgggagacagaggtcctggatttttttttctttttaatattaatggttaaaatacacacaacaggccctacacggtggctcacgcctgtaatcccagcactttgggaggccgagacaggcagatcacctgaggtcaggagttgcagaccagcctggccaacatggtgaaactccgtctctactaaaaatacaaaaattagccaggcgtggtggcacatgcctgtagccccagctatttgggagtctgaggcaggagaatcgctggaactcgggaggcagaggttggagtgagccaagatcgcgccactgtactccagcctgggtgacagagcaagactctgtctaaaaaaaaaaaaaggccgggcgcggtggctcaagcctgtaatcctagcactttgggaggccgaggcggtggatcatgaggtcaggagatcgagaccatcctggctaacacggtgaaaccccgtctctactaaaaatacaaaaaaattagctgggcgtggtggctggcgcctgtagtcccagctactcaggaggctgaggcaggagagtggcgtgaacccaggaggcagagcttgcaatgagccgagatcgcgccactgcactccagcctgggcaacagagcgagactccgtctcaaaaaaaaaaaaaattcatacaacataaaacttaacgatatttttaaaaatttgttttgggaacagggtcttactcctgttgcccaggctggagtgcagtggggcagtcagttcactgcagcgacttctcaggctcaggtgatcctcccacctcagcctcccaagtagctgggactacaggcatgcaacaccatgcccagctaattttttaaatatatatttttagtagacacagggttttaccatgttgcccagactgctttcgaactactggcctcaagagatccacctcctttgtcctcccaaagtgctgggactacaggcgtgagtcactgtgcctggccaaaatctacgatcttaaccatttttaagtgtccagttcagtggcattaagtacattcccatggtgctatcccggttaccattcacctccagaagggggcctagtttttttttatttgagatggagtttcgctcttgttgcccaggctggagtgcaatggcgcgatctcggctcactgcaacctccgcctcccgggttccagcaattctcctgcctcagcctccagagtagttgggattacaggcacacgccaccacgcatggctaattttgtatttttagtagagatggggtttctccatgttggtctggctggtctcgaactcccgacctcaggtgatccacccacctgggcctcccaaagtgctgggattacaggcagaagccactgagcctggcggggggcctagttttaattggtacagggagggggagtcagagaagccacatcttttctatttttattttagttttattgatttatgtattgattttatttattttgagaagaggtcttgctctgtcacccaggctagagtgcagcggtgcgatcatagctcactgcaacctcaaactcctgggctccagccattttccctcctcggccttcccagtagttggaattacaggaatgtgtcaccatgaccagctaatttttaaaaattttttgtagtggtagctcacgtctgtaatcccagcactttgggaggccgaggcagaaggatggcttgagcccaggggttggagaccagcctgggcaacgtagtgagacccgtctctattaaaaaaaaaaaaaagaaagaagaagaagaagaagaagaggaagaggagggaaaaaagtaagaataattttaaaagtaaataaataaataatttttttggtagagacagagtcttgctctgttgcctagggtagtctcaaactcctgagctcaagcgatcctcccatcttgccctcccaaaataatggaattacaggtgctactatgcccagcctgagattttgtactctttggccatcatcttctccccctagcctctgtagtcaccagtttactctgcctctaggaggagttcagatgttttagattccacgtatcaatgaaaacatgtggtgtttgtctttccgtgtcttatttcacgtaacataatgttcgccatttccatccacattgttacaaatgacaggatttcctttttttttttttttttgagacagaatctggctctgtcacccaggctggagtgcagtggcgcgatctcagctcactgcaacctctgcctccccggtccaagcgattctcgtgcctcagcctcccgagtagctgagattataggtgcgcatctccacatctggctaatttttgtatttttagtagagccgagtttcaccatgtcagccaggctgatctcaaactcttgatctcaagtaatccacccacctcggcctcccaaagtgctgggattacaggcgtgagccaccacgcacagtgtattttcttcttttttaaggttgaatagtattccatcgtgtatgtataccacatttttttttttttgagacaaagtctcgctctgtcgctcaggctggagtgcaatggcgtgatctcagctcactgcaacctctgcctccagggttcaagcgattctcctgctttagcctcctgagtagctgggatgacaggcatgcgccatcacacctggctaatttttgtatttttaatagagacggggtttcgccatgtttgtcaggctggtctcgaactcctgacccgaactctgcctgccttggcctcccaaagtgctgggattacaggcatgagccaccgtgcccggccccacatattcttgatccatacatctggtgatggacacattccatatattggctgttgtgaatagtgctgcattgggaagacacgtccgttggacaaactgatttcatttccttatttatatatttatttttactttttttttttttgagacagagtctcactctgttgcccaggctggagggcaatggagcaatctcagctcaatgcaacctccatctttcgggttcaagtgattctcctgcctcccaagtagctgggactacaagcgtctgccaggacacacggctaatttttgtatttttagtagagatggggtttcacgatgttgtccaggctggtctccaactcctggcttcaagtgatccgcctgcctcggcctcccaaagtgctgggattacaggcgtgagccaccacgcctggccccttcttactatttgttaaacacaccaggcacagtttggcctccaggtctttgcaccctgtgtttcctcttcctggaatgctgttcttctagctactgcatggttctgtcctcatctccttcaggcctttattcaaatgtctcctcaggctgggcgtgatgtccctgcacctgtaatcccaacactgggaggccaagggggatggtgcgggggattgcttgaggccaggagttcgagaccagtctggccaacagagtgagaccctctcgctctctctctctttttttttttttttgaaatggagtcttgctctgttgccaggctggagtgcagtggtgcgatctcggctcactgcaacctccaactccctggttcaagcgattctcctgcctcagccttccgagtagctgggattacaggcacgtgccaccacgtccagctaatttttgtatttttagtagagacgggggtttcaccgtgttggccaggatggtctcgatctcttgacttcgtgatccacctgcctcgggctcccaaagtgctaggattacaggcgtgagccactgcacctggcctgtctctctctttctatatatggtgcttttgttgctgtttttgagacagggtcttatcctgtcacccaggctggagtgcagtggcatgactgcaactcaacctcctgggctcaatcgatcctcccaccccagcctctcaagtagttggaaccacaagtgcgcgccactacccctggctaatttttaaaacattttttgtagacatgggggtctcagtatgtgactgcttgaggccaagagttagaggagaccagcctgggcaacatagcaagaccccatttctacaaaaaatttaaaaattagctgaacattgtgatgcacacctgttatcccagctactctggaggctgaggcaggaggattgcttgagcctaggagttcaaggttgcagtgatctatgatcgcactgctccagttacagagtgaggtcgtgtctctaaaaaaaaaaaaaaaaaaaaagagagagaggaaagggccgggcgcagtggctcacgcctgtaattccagtactttgggaggccgagacaggcggatcacctgaggtcgggagttcgagaccagcctgaccaacatggagaaaccctgtctctactaaaagtacaaaactagccgggagtggtggcgcatgcctgtaattccagccactagggaggctgaggcaggagaatcgcttgaacctgggaggcagaggttgcggtgagccaagatcgcaccattgcactccaagctgggcaacaagaacaaaaatctgtctcaaaagaaaaaaaaaagagagagagaaagcaaggaaggaagggagggagggaggaaagaagggagagggagaggaagggaaggaaagaaagaaaaagagagagagaaaagagcagttatgaccaggtatggtggctcatgcctgtaatcttagcaatttgggaggccgaggtgtgtgcatcacttgaggtcaggagttcgagaccagcctagccaacatggtgaaaccccatcgctactaaaaacacaaaaaaattggccaggtgtggtggcacacgcctataattctagctacttgggaggatgaggtgggaggatcacttgaacccaggaggcagaggttgcagtaagccaagatcacgacattatactccaacctaggtgactgtcttaaaaaaaaaaaagaaaaagagcagttacttttattaccctcattttgtagatgaggaaactgatgcacagagaagttaagtcacttactcaaggtcacacagctctgaagcagcagaggtgggatttgaacccaagcagagcaggctgcagccactctgttggcacaagggtggttatcagtggccctggctctagccgagtgtgcatctcatccccgcctctctcctcacagccgttccaacaaaacccagactgtggcagtggcagccggacggagctgggtggccattcctcgggaacagctcaccatgtctgacaaactccttgtctggggcactaaggcaggccagcctctctggccccccgtcttcgtgaacctagaaacccaaagtaacgtggcaggagggtgggcgctctatgcggggtgggtgctcttggagggcgtggctcactacaccctagtttccccttccccagtgaagccaaacgccccccggctgggccctgacgtggacttttccgaggatgaccccctggaggccactgtccattgggccccacctacatggccatctcataaagttctgatctgccagttccactaccgaagatgtcaggaggcggcctggaccctggtgagtgctggggtccttttctccccaccctattccgggcggggactgaggcaacatctcctaatctgagacccagcccaggactcattctgtgcctgcccctgagcctgtatgcctcccactcaaaatgcctgcatgtgcctcttgttcagctacaaattctcctcccatggctgggcacggtggttcacgcctgtaatcccagcactttgggaggctgagggggatggatcacttgaggtcaagagttcgagaccagcctggccaacatggtgaaatcccatctccactaaaaatacaaaaattacctaggcatggtggtgggcgcctgtaatcccagctactgaaagctgaagcaggggaatcactggaacccgagaggcagaggttgcagtgagctgagattgggccactgtgctccagcctgagctacagagtgagactcagtctcaaaaaaaaaaaattttttttctcctgccaaaataatctatcacccggtcacagtggctcatttctaaaatcccagcaccttgggaggctgaggcaggaagattgtttgaggtcaagagtttgagaccagcctgggcaggatagcaagactcgtctctaagaagttaaaaaataatctgaccaggtgcggtggctcacacctgtaatcccagcactgtgggaggccaaggagagtggatcacctgaggtcaggagttcgggaccagcctggccaacatggtgaaaccccatctctactaaaaatacaaaaaagtagctgggcgtgctggtgggtgcctgtagtcccagctaattgagaggctaaggcaggagagaatcacttgaacccaggaggtggaggttgcagtgagctgagatcgtgccactgcactccacactccagcctggcaacagagcaagactccgtctcaaaaaaaaaaagaagaagaagagttcagaattgtgattattcatgcaattcagagcaacactgagatgcagaatttttttttttttttttgagatggcgttttgctcttaattgcccaggctggagtgcaatggcatgatctcggctcactgtaacctccaccatctaggttcaagcgattctcctgcctcagcctcccgagtagctgggattacaggcatgtgccatcatgcccggctcattttgtattttcagtagagacggggtttctccatgttggtcaggctggtcttgaactcctgacctcaggtgatccacccacctgggcctcccaaagtgctgggattacaggcatgagccactgcacccggcccccttttttttttgagacggagtctcactgtgttgcccaggctggagtgcagtggtgccatctcaactcactgcaacctccacctctcaggttcaagtgattcccccacctcagcccctcaagtaggtgggattacaggcatgtgccaccatgcccagctaagtttttgtattttttttaatagagatggggtttcgctatttggccaggctggtctcgaactcctgacctcaggtgatccacccacctccacctcctaaagtgttgggattacaggcgtgagccacctcacccggctgagatgcagactttggaatctgactacctcagtgctcagctccagcacaccagctctgtgaccttgggctagtcactttccctctctgggcctcagttccctcgtctgtaaaacgagataataatagaagttaccacttcctgctatacctagcacatagagtgaccaccttttctctgtctgctcgggactgtggcaatttttttgacaggcccatgttctggaaacccccttggtcctgggcaaatacaaatggttgctcactctgctgatagataagttcaagtaccagctaggcgcagtagctctaatcccagcactttgggaggccgaggtgggcagatcacctaaggtcaggagttcaagaccagcctggccaagatggtgaaaccccgtctctactaaaaatacaaaaattggctgggcttggtggctcacacctgtaatcccagcactgtgggaggccgaggcgggcggatcacgaggtcaggagatcgagaccatcttggccaacatggtgaaactctgtctctactaaaatacaaaaaattagctgggcatggtggcgcgtgcctgtaatcccagctacttgggaggctgaggcaggggaatcgcttgaacccaggaggcagaggttgaagtgagctgagatcgtgccactgcactccagcctggcgacagagcaagactctgcctcaaaaaaaaaaaaaaaaaaattaaccaggtgtggtggtgggtgcctgtaatcccagctactcaggaggctgaggcaggagaattgcttgaacccaggagggagaggttgcagtgagccaagatcacaccactgcactctagcctgggccacaacgagactgtctcaaaacgaaaaacaaaggaaaaaaaaaaagataagttcaaatacccttgactcaggccctgggcccatcacgctcgcctgtctctcccccagctggaaccggagctgaagaccatacccctgacccctgttgagatccaagatttggagctagccactggctacaaagtgtatggccgctgccggatggagaaagaagaggatttgtggggcgagtggagccccattttgtccttccagacaccgccttctggtgaggatatctgggcttgccctcaatccacgcccctcccacccccagaagtctgtccaatcatgtcccactcatttgttccccgtttcctcatccttgccagctccaaaagatgtgtgggtatcagggaacctctgtgggacgcctggaggagaggaacctttgcttctatggaaggtgagcttcaggcaccagttacatttctctgcacgtgttaggaaacccctaaataacaatgacataaggccggatgcagtggctcacgcttgtaatcccaacactgctgtgggaggccgaggagggtggatcacttgaggtcagcagttggagaccagcctggccaacatggtgaaaccccatctctactaaaaatacaaaacttcacggggagtggtcgtgggcgcctgtaatcccagctactctggaggctgaggcagaagaatcacttgaacccaggaggtgaaggttgcagtgagccgagatcacaccactgcactccagcctgggcaacaagagtgaaactccgtctccaaaacaaaaaacaaacaaaacccaatgacataaacaagacagagtttaccatgctgcccccttgaggttgcttcgaagattcaaggatgggttgctaaagtggtcagcacagggtggggcatggagcaagtctccaccaatgtcagctgcttccgagaggtctgagccataaggatgggtgcagatattccgggcaggggcagcagatgcaaaaacctgacagcgagactggagctcagctccagaaaatataacacagtgtgctaagagtttatttattcatttatttattttgagatggagtctcgctctgttgcccaggctggagtgcagcagcgtcatctcatctcagctcactgcaacctccacctcccaggttcaagccattctctgcctcagcctcccaagtagctgggattacaggtgcccccccaccacgcccggctaatttttgtatttttagtagagatgggggtttcaccatcttggccaggggggccttgaactcctgacctcatgatccagccacctcggcctcccaaagtgctggaattacaggcgggagccaccgcgcctggcctgtgctaagagtttaaatgctagtatcaaaagggtattaataggctgggcatggtggctcatgcctgtaatcccagcactttgagaggctcaggtgggcagatcacttgaggtcaggagttcgagaccagcctggccaacatggtgaaaccccatctctactaaaaatacaaaaattagctgggcctggtggcaggcacctgtaatcccagctacttaggaggctgagacaggagaatcgcttgaacctgggaggtggaggttgcagtgagctgagctcgagccactgcactccagtctgggcaacaagagcaagactctgtctcacaaaaaaaaaaaaaaaaaaggtattataaaatggctgacaaggtgcaattatcctcactgattcaaatctgtgaagcacctgctatgtgccaggtggcattgcttgacccttgctctcagtaaataagcaaaggaacacgatgacaggtgtggttttccaccttcttagaccacacaatccagtatcttttatttatttatgtatttgagatggagtgtcactcttgttgcccaggctggagtgcaatggggcgatcttggctcaccgcaacctccgcctcctgggttcaagcgattctcctgcctcagcctcctgagtagctgtgattataggcgcccgccaccacacccggctaatttttgtatttttagtagagacgaggtttcaccatgttggccaggctggtctcgaactcctgaaatcaggtgatctgcccactcggcctcccaaagtgctgggattacaggtgtgagccaccgtgcctggccgatattttaaaaaattaaatcagcaaactagagttcaaggaccaactgcctgttttcagaaatacagtttgattggaaccaagaccagggttagggaggtgagcagggtagggtcacacaggtgcaggatcaaatcctgtttttactttaaaatcttgatattttggaccgagtgggtggctcatacctgtaatcccagcactttgagagtctgaggcaggaggaccacttgaggccaggagttcgagaccagcctgggcaacatagcaagctacccatctatacagagaataaaacattaccaggggccgggcacagtggctcagcctgtaatcccaacactttgggaggccgaggcgggtggatcataaggtcaggagttcaagaccagcctggccaagatggtgaaacccccatctctactaaaaatacacaaattagccgggcgtggtggcaggcacctgtaatcccagctacttaggaggctgaggcaggagaatctcctgaacccggggaggttgcagtgagctcagattgcgccactgcactccagcctgggtgacagaatgagactctgtctccaaaaaaaaaaaaaaaaattagcggggtgtggtggcatgcgtctatagtcccagctactggggaggctgaggtgggaggatcacttcagcctaggatgttgaggctgcagtgagctatgattgcaccaccgcacttcagcctgtacaatagtgagaacttatgtcaaaaagaaaaaaaaaaaaaagatggctgggcgtggtggctcacgcctgtaatcccagcactttgggaggccgagacgggcggattttttttttaagagacaaggtcaggagatcaagaccatcctggctaacatgtgaaaccccgtctctactaaaaatacaaaaaattagccggacgtggtggcaggcgcctgtagtcccaggtactggggaggctgaggcaggcgaatggcgtgaacccgggaggcagagcttgcagtgagccgagatggcgccactgcactccagcctgggcgacagagcgagactctgtctcaaaaaaaaaaaaaaagttgatattttgtttgtcatgggtttttaggcattaattttcatttattacaatactgcattaaaatattatttatctcacttattgggtttttggtatcccccactcccttttaaattttgcacctggccaggtttgctgactcacgcctgtaatcctagcactttgggaggctgaggcaggcagatcacttgaggtcaggagtttgagaccagcctggccaacatggtgaaaccccgtctctactaaaaatacaaaaattagccgggcgtgatggcaggcgcctgtaatcccagctactcaggaggctgaggcaggaacatcgcttgaacccgggaggtgaaggttgcagtgagccgagatcacgccacttcactccagtctgggtaacagaatgaagactccgtctcaaaaaacaaacaaacaaacaaacaaaaaatgcttcactgaccggtggtttatcaggtgacctcagggagacacatatatgtgcgtgattaatgggagacattaacccctttttcccttcatctctcaggccccagggccctgtgtgcaggtgagctacaaagtctggttctgggttggaggtcgtgagctgagtccagaaggaattacctgctgctgctccctaattcccagtggggcggagtgggccagggtgtccgctgtcaacgccacaagctgggagcctctcaccaacctctctttggtctgcttgggtaagagactgtgaccttcctcagctcggtgccctggaggggtgggaagtgacttcctgagtgggcagctgagacttctctccaccctccagattcagcctctgccccccgtagcgtggcagtcagcagcatcgctgggagcacggagctactggtgacctggcaaccggggcctggggaaccactggagcatgtagtggactgggctcgagatggggaccccctggagaaactcaactgggtccggcttccccctgggaacctcagtgctctgttaccaggtgaggccctgggacacctgggtctccatccccgctgttagagcagacggatgggtggacttgtaagagggagtgctatgattaaagtagcgtgatggccgggcttggtggctcatgcctgtaatctcagcactttgggaggccgaaaggggcggatcacctgaggtcaggagttggacaccagcctggccaacatagtgaaaccccgtctctactaaaaatacaaaaattagtggggcgtggtggcacatgcctgtagtcccagctactcgggaggctgaggcaggagaatcgcttgaacctgggaggtggaggttgcagtgagccgagattgcgccactgcactctagcctgggtgacagagtgagactcagtctcaaaaaataaataaataaataaataaatagcgtgaattcacacaagacttttttttttgctttttggaggcaagatcccactctgtggcccaggctagagtgcaatggtgccatctcagctcactgcaacttccatctcctgggttcaagtgattctcgtgactcagcttcccgagtagctgggactatgggagcgtaccaccacaatcggttaattttttttttttttttttaagtagagacggggtttcaccatgttggtttggctggtctccaactcctgacctcaagtgatctgcctgccttggcctcccaaagtgctgggattacaggcatgagccactatgcccagcctaacttttcttttttttttttttgagatggaggctggctctgtcacccaggctggagtgcaatggtgtgatctcagctcactgcagccttcacctcccgggttcaagcgattctcgtgcctcagcctctggggagtgactgggatcacaggcccccaccgccatgcccagctaatttttttatttttagtagagacggggtttcaccatgttggctaggctggtgtcaaactcctgacctcaagagatccacccgcattggcctcccaaaatgatgggatgacaggggtgagccaccatgcctggccctttttttttttttttttttggagtcttgctctgtcgcccaggctggagtgcagtggtgcgatatcggctcactgcaagctccacctcctgggttcacgccattctcctgcctcagcctcccgagcaactgggagtacaggcgcccgccaccacgcccggctaatttttttttttttttgtatttttagtaggaacggagtttcaccatattagccaggatggtctcgatctcttgacctcgtgatctgccctcctcagcctcccaaagtgctgggatttcaggcatgagccaccgcacccggcatttttttttttttaagagatgagtctcactctgtcagccaggctggagtgcagtggcgtgatctcagctcactgcagcgtcgacctccatggctcaagcaatcctcccacctcagcgccctgaggagctggtattacaggcatgcgccaccaagcccagccagtttttgtattttttgtagaggtggggtttctccatgttgcccaggctgttcttgaactcctgagctcaggcaatccacctgccttggcctcccaaagtgctgggatgacaggcatgagccacggtacctggcaagaaatctttataaataaataaataaataaataaattaattaattaatgaacttggaagaactgtgaagatgttgggtaagaaatttaggacacagtcccaagacccacaaggatatatgaaccaaagaagcgaaggcccaattatggaaaattcccagttggggaaggctatgtggatgtgatagggtttaggggagagagtgcagcaccctcagctaccatggtaggtgctgtcagttgcctgctcatatctgtttgaccacctcagaggttttaggcctctctcccagctgcccacacttgtttcctggcctaagggctttttctggtcactgaggcattttgcctgcctgagaagcaagatggaaatattgagaagagccctcaggaacagccctcagcatgactaatgaggcttggtggataaataccccagctccgtccccctgagctgggctgactctgcgatgcctgctctctgctggcccctagaggtcccccatgggactgcgtctcagttgtccacagtgagaacctgttccttccccatttcactcccctactgccctattggggttttctgggattacctcctagataaatgacttacagtcagatccttatctcagggtgtccttctggggaccccagtgaagacacctaggaaatgagcatgggaaggagagccaactctaactggtctttatttctttgtcactcagggaatttcactgtcggggtcccctatcgaatcactgtgaccgcagtctctgcttcaggcttggcctctgcatcctccgtctgggggttcagggaggaattaggtaagagtggggctggaggatgggggggcttctgtaacccaggccgaccttgacctactgccttcctccccagcacccctagtggggccaacgctttggcgactccaagatgcccctccagggacccccgccatagcgtggggagaggtcccaaggcaccagcttcgaggccacctcacccactacaccttgtgtgcacagagtggaaccagcccctccgtctgcatgaatggtgagcttccctgcctgctgacctgtcctcccagcccccacaagacccacccatcagtcagccccaccccttgtccccacgtgggcctctttggcccagggaccatacatggtgtcctcaattccctcttggctatcaatgtaacgagctttcattcggccattaaaaatgaggatgccaatctatatttattgacattgaaagatgcttgtcatattttattagtgaaaaagataaaaggatgttaaaattccgtggtatggttccattttttttttttttttttgagacagagtctcgctttgtcaccaggctggagtgcaatggcacgatctcagctcactgcaacctccgcctcccaggttcaagcaattctcctgcctcagcctcctgagtagctgggattacaggcgcatgccaccatgcccggctaatttttgtatttttagtagagacagtttcaccatgttggtcagactgatctcgaactcctgacctcgtgatccacccacctcagcctcccaaagtgcggggattataggtgtgagccactgcgcccggcctatatataattttaaaaatatatatagaaggcccggcatggtgggtcacgcctgtaatcccagcactttgggaggccaaggcaggcagatcacttgaggtcaggagttcgagaccagcctggccaacatggtgaaacctcatctctactaaaaatacaaaaattagccaggcatggtggcacagcctgtagtccagctactcagaaggtggctgaggcactagaattgcttgaatccgggaggtggaggttgcagtgagccaagatcatgcaaagacaaactaaataatatctaagcagtgtatgagatggtgataagtgctgagtagagaatgaagcaaggggctgggcaaggtggctcacacctataatcccagcacttttggaggccgaggtgggcagatcacctgaggtcaggagtttgagaccagtctgaccaatatggtgaaacccagtctctactaaaaatataaaaattagccagatgtggtggcgggcacctgtagtcccagctactcaggaggctaagacagcagaattgcttgaacccaggaggcagaggttgcagtgagctgagatcacatgactgcactccatcctgggcaacagagtgttacagagcgagacttcatgtcaaaaaaaaaaaaaaaaaaagagaatcaaacaaggaaggtgggtggtgaagggggtgcaatttcaaatagagcggggtcaaggaaagcctcacggaagaggtgacctttgagcaaagacctaaaagagatgaggagggagccatgtggatacctgggagagagtgttgcagacagcaggaagagcacatgcaaaggccctgtggtaggcttgaccacctccccaacttctttggttgtgttctccagtgagtggcaacacacagagtgtcaccctgcctgaccttccttggggtccctgtgagctgtgggtgacagcatctaccatcgctggacagggccctcctggtcccatcctccggcttcatctaccaggtaggggggttgggatgggattgccacagggaggggatgtactccacagtggggagaggtagcatctggagtcattacttggaagctaggtgcagtggctcacccctgtaatcctaacactctgggaggctgaggcaggtggatcacttgagcccaggagctcgagaccagcctgggcaacatagtgagacccccttctctacaaaaaataaaacaattagctggatgtggtagcatgcgcctgcggtcccagctcctggagaagctgaggctcgaggatcgcttgagcccaggagttggaggctgcagtacacggattacaccactgcgctccagcctgggcaacaaagcaagaccctgtctttaaaaaattaagaattgccaggcacagtggctcacgcctgtaatctcagcactttgggaggccgaggcgggtggatcagttgaggtcaggagttcgagaccagcctggccaatgtggtgaaaccccatctctactaaaaatacaaaaattagctgggcgtggtggcgtgcggctgtaatcccagctacttgggaggctgagagagaattgcttgaacccaggaggcggaggttgcagtgagctgaggtcgcaccactgcactccagcctgggtgacagggcaagactctgtctcaaaaataaaaataaaaaataaaataaaataaaaaattaagaatgatctcttccctaccctaccagataacaccctgaggtggaaagttctgccgggcatcctattcttgtggggcttgttcctgttggggtgtggcctgagcctggccacctctggaaggtgaggctgtcggatacatgcatctctacccacgtggggaaggcagctgggcattttgctgagcttccagggggcttgaagggaggcctcagggcgcagtcacattcatgaaccctgcaccctgggctggggcatctggccatctggatctgctgccctgactactcctgtcttgccaggtgctaccacctaaggcacaaagtgctgccccgctgggtctgggagaaagttcctgatcctgccaacagcagttcaggccagccccacatggaggtgagtcaaagggccggctagtcggagccctctgggggactggggagtcctggggcagtggggagggggtgaggtgtgggtcggggaggctggggcaggattacaggctcatctcttcccagcaagtacctgaggcccagccccttggggacttgcccatcctggaagtggaggagatggagcccccgccggttatggagtcctcccagcccgcccaggccaccgccccgcttgactctgggtatgagaagcacttcctgcccacacctgaggagctgggccttctggggccccccaggccacaggttctggcctgaaccacacgtctggctgggggctgccagccaggctagagggatgctcatgcaggttgcaccccagtcctggattagccctcttgatggatgaagacactgaggactcagagaggctgagtcacttacctgaggacacccagccaggcagagctgggattgaaggacccctatagagaagggcttggcccccatggggaagacacggatggaaggtggagcaaaggaaaatacatgaaattgagagtggcagctgcctgccaaaatctgttccgctgtaacagaactgaatttggaccccagcacagtggctcacgcctgtaatcccagcactttggcaggccaaggtggaaggatcacttagagctaggagtttgagaccagcctgggcaatatagcaagacccctcactacaaaaataaaacatcaaaaacaaaaacaattagctgggcatgatggcacacacctgtagtccgagccacttgggaggctgaggtgggaggatcggttgagcccaggagttcgaagctgcagggacctctgattgcaccactgcactccaggctgggtaacagaatgagaccttatctcaaaaataaacaaactaataaaaagcaaaaaaaaaaaaaaaagaaaagaaaaaacactgcatttgggcaccatctcagctcccttgcatccaggtgcagcatggactgagttcttgacaacagaatgtggtcagaagtgacatatgccaacacggggtctgggtgggggctcccccacatcctttccttgcctatgagctggaacataacacatgcctatgatccagctttggtcatacccaaggggaaggtggagcaagaaatgaaaaggaacctgaatccctgaatgactgcatggatagaaccactaagaaaaataaacttttatatttttatagctactgtagctttgaggtctttttgttacagcagctcaatctatactctcactgattcataatctttgactgtagcagggttaagcctcaaatttcccaccaggagatgacgctgtgattctgtgctgactacacacacattcaagccgtcttgagtgctttcacattttattttcaagtataaaggcttcatcgcagaaggaggccagggttacaggcagtgggcaaggggtctggaagcccaggtttaggtggacgtgcaggctagctggctcccaggtgccatggccagtcctgtggtccctgtctgtgcctgggaccctcttctgggtgccaagaggccgaggtagctgtgagaggagctggacatggggtggaggggcatgggttcacatgaccgcacaacactggcacgtcttttgcttagggccacttgcctcttcaccctcggtgggggcagatggctcaggctgccgggcaggcgcgtaggtgggcacagggtgggcactggggttggcgctgggcccctccccctgaagcagtggctggcattcggcgggctgctctggggctggggtctctgccagaagaggtgtggcatcccccaaggggccttggccctcagcagcggtttggggcttcactccttcctcctccagggctcctactggcttctcctggggctggggtccttccttctctggccttgtctccgtgttagcctcaaggggaggccctgcctcattcatctcctctgcctgggattcacttccttccctagacccttgttctagattcagatctccctccgtcccttgggtcttctctgtctccaatgattcctcacctccccttttctctgcctccagtgtctcctcccctccctttctctctgcctccagtggttctttggttgcctctggctcttcctcacctcctttcttctctactcccaatggttcttctacctcctcctcctctgcccctcgcttttcctcatctccttccttctctgccctcaaatgtccctcaacttttctctctatgcccagtggttcctcacctccttccctctctgttcccagcttttctgcacttcctctgctctccagctccaacttcttctctcctcctttcctctctaccactggtgacatctccgcttcatccctccctgtccctggcttttcctcacttcctattcccatggattcttccgcttttctcttctctgcctcccaggtctcctcgcctcctcccgtcttggccccctcggcccccagcgggctttcatctcctctctccctccctgccacctcgggcccttccaacccctccaccagcagctcctcccactcttcactgagggtcactctctccacccaaatgaaggatccctcctctcctccagagcctccctgcccatcaccctcagggctgccctggggcacatcttccccttctatggaagctgctgcctctaatctctcctggagcctaggcgagctagtctgcacgacctcagggaccctgcctatctcccccatggcctctgcatcactgccacccaccccctcccagaccacctccacgatgcccctgtcctccttcacccaggccgggagctccaggctaccagctcccttcctgtctccgatggcttccagcaccacttcctccaccttagcctccagctcggggcccgtggcccctgtggcacagtcctctgtggccctcagcccttcccacaccacactcaccacgccccctcctttggcctcacccacccgcccttcggatggcactgccctctgacttagcccctgctctggagtggggatggggctggggcatgggccattggcttctgaggagtctcctgctgccccggggacctgcctcgggcctggcagaaaccccaagacatcctccctgggctcagagggggactctggaggcgtgcccactagtccagccggcagggaggctctcttgttcagatcagtctggcctgggggagtcagaggtggaggggagaggacaaaagggaagacagggttaagatggaacaaaaggactgccatccacactccccttgagtcaccctctcacacccaggctctggggtgacctgacccccagacctaggggctcccacacttacctacagaacctgcctcgacaatggactgggagagaggacggtgaccctgcagagatggcggagacaaggtcaggctggccctcatccccacctccagcctccctgcatgctaggctcccaccccaccacccctaaataccctcagtggctctctattaccttcaggatcaaactccacattgtacctctgccttcctcatctatcttattgccctatgttccagggccttgcacacagtaggtgcttaaacaatactgcattcccatagccaatctgtattaggggcctactttgtcagttactggttaccatgcacaagggacacttaagccttttgtttttggcacttacattccaatcaacataaatacaaattaattttttttttgagatggagtcttgctgtgtcgcccaggctggagtgcagtggcgtaatctcggctcactgcaacgttcgcctcctggtttcaaacgatttccctgtctcagcctccctagtagctgggactacaggcacctgccagcatgcccagctaatttttgtttgagacagagtctcactctgttgcccaggctggagtgcagtggtgtgatctcagctcactgcaacctctgtctccagggttcaagtgattctcctacctcaacctccccagtagctgggactacagggacacaccaccataccgagctaatttttgtgtttttagtagagatggggtttcaccatgttggccaggctggtctccaattcctaaccttaagtgatccgcccacctcggcctcccaaagttctgggattacaggcgtgagccaccatgcctggcctatactgttgttattcccattttagagatgggaaaactaaggcttggaaaaggaaattgacttgccaagaccacagagcaaagtaaaagcgggaagcggatctgaatgcagacctagtggccaggctgcccttggagaaagctgcattcctgattccatgtcctgccttgaggcctgctggccatgccctcccatcccactcccctgattcccccctcacctgtctgcgccagctgggcctgcctgagggcttgtgctgggcacctgtggaagcactttgcaacagttgcagctgggactggagtctgaagaagagagagggctgctaggagctgggcccccaggctccttgggctcctagactcaagcgaccacctccttggaatgtgcccagggtctcgatctcacccagctggggcagggttcgggcagagctagaaggtctccactcacgtgaacaaactgtcttccaggttccggattcgggcctgagcctggccctcgggtgactgggggtccttcgaggtggggtcttcggatggctctggcactgcagctgccccatccattagccaacgttcccggagagacttcctctgggcaggggaagggagttggggctgggcatacagactaccccggtccatgtaaagtcccctcccgacctctgcaggctgggcaggtatcttatcaccacctcacaaccagttgcgacatacatcaggctgggatacatggccacagtgccccccaacgctgcaagtgggcagacatcccttgttccaaacccttccaaaatgaaacgggcacttccaaagtgaaatcaatgtccctccctactggcccctccctaccccaaagctagacttcggctcctctccatctcccccaaattgggacaaacagcatcactgtcccagacttttccccaaatggaacaaatgtccccatgaccaccccacttcgtccctcccaggctgggaaagacataccccgccccggccaagctggaaccaacgcccccaactgcccgctcccccccaaaaattggacagaggctcctatcgtcccccaaaccgacttgcacagacaccccccactccattccccaggctaggcaggcgcccccgcccgcccccaaccttgagacgctccacgcggagtttctcctcctccacctcccggcgcgcggcgcggatctcctcctgcagccgccgcttctcctgcgcacagaggacccggagctgcccgccggccgggcgcggcctccaccacctcctcttccctccctttcccctccctcctccgcggggctcaccggagctcccggggctcccgaggcagcgagcccggcgggggtggcccagcgcgggtctgcacccagggcggggagggggctgcggaggcgctgactcagcggcgggcggagtggggggggcggggcgggggcggggccggccgcgcccgggatgctgcggaggcctcgcccgcgcccaatgggggtctgtggatggggggtgtagggggtggggccttgggacagctatcgggggaggggcagagctggggagctccgagatacgaggttaagagaaatggggatcaaagggagggtgcggccgtacgcggtggctcacgcctgtaatcccaggactttgggagaccgaggcggacagatcgcttgaggtcaggagttctagcctaccctggccaacatggtgaaaacccggctctactaaaaatacaaaaattagctgggcgtggtagcaggcgcctgtaatcccagctaccggggaggctgaggcgggagaatctcttgaactcgggaggcgcaggttgcagtgagcggagatcgcgccactgcactccagcctgggcgacagagcgagactccgtctcaaaaaaagaaaaaaggaggggagggtgctagtgagatgggggtccgaaatggggatgcagccatgggagcccagagtaatggagtgtagacatggaatctagagagatggggtgcagaggtgggggtgcagagagatggggtacagaagtggggtacagtgagatggggtacagaagtggggtgcagataggtggggtatagaagttgagtgcgaagagatagggtacagaagtggggtatagagagatggggtgcagggagatggggttccatagatggggaataaaaaggagggtgctagtgagatggggatccaaaatgggggtgcagccatgggggtccggagagatggggtgcagagatggggatcaaaaggaggatgctagtgagtagtgagatgggagtgcagccacggggtccagagatactgaggtgtagaggtggggatcagggagatgggatacagagataggggtcagaaatatggggtacagaggtggaggtatggatagatggggtatgtaagtgcgtgcggaaagttggggttcagggagatggaggagggaaggatgcaggacagagataggatcagagtggtagagacccagagatgggggagtccagagagacgaggaagtcagggatgaaagttcccaaggaaggactgtcaggatgggggctccgaggtagggagatttgagagatagcggtctgataaaaggcggtccgagagatgcggctcaggcatggggtttttgggaggctggggttcaggaatgaggcatagccgatgcaggctctggaagtgtgggggccacagctccccattctgagggtggtagtgaccagacaggaactggggggcagagggggctggagaattggtgtggggagccctgggcggggctggagctgagggcgctctccgcagagatgacggagagacgagaagggagcatggtggaaagtttgggggtgcccagggcgcggggagggcgtcacttacagcgatgacttctagccgctgccggtagagggagctctccgccatgggcctgttgggagagggcaggggcttcgaggggctcccatcttgaacgcccccctcttggccaagatccctgagcagtatggaaattgccccgagcccagcactttgcctctgtttcccctttgcacctgggaagagtctgggcggggggcgagggtcttgggaggggaactgagcagtgaccacgactggtgaggctaaagccctccctaaatctggctttgtctctctcagcctcagtttcctcatctgtaagatgggcaggaatagcttgaccaccctgtccttgccacccccgatctcagaggacgcttgcaaggagctattcatgcagggaaaagcttagggtacagtgctacaaaaatagtcccattgtttatgaataatcataatttatataattccatgatgaataatatgtatgattaattataataaccatctccagtccaacctgcagaaactctcaaatgccaccaggcccctaacaggctgtgtgcctctttctcttcccagtcccacaccctctctggacctcagctcctacccagaatttctcaagcgctgggggggcaagcgagtctgtggccctcccactgttgccatggtaaccccagagctgcctcctccacctgctaacccccctccctggggacaaggatcactgggtcactctgcctaggactggactctgagctgggaggagggggacttgccatttaaggtttaactcgagattcccctgtcattgtcttcctcaaaacatctctacttctcagcctccagagtggcctctggacccacttaggctcccgtggaagctggagggtgactgtcatactgcaggatgattagggacagtcagtgtcacaccaaccttatcaacacagacatgcattgggcacccctgactatgttgctatgttgaccacgtgtcacaggccagtatctagaaagcgatgtctctctgcctgtcatctccaccggcatggacgggcgctgatcaaaccctcaaacatttattaatttgaacagtcaccctactgggtaagcctcattgcctgaactccagctaggaccttccagatcttctgtggccacaacgtgaaggctattagcacttatagtgctatatatatgatatatatatactatatatagcatatagtgttctaagtgccccacggggtttccgctaggttcccacagccacctctgcctccccctccctgcctctatcatgacacagtggagtcaactctttgctgagttgacattccagctaagaacaaaatcagccaaccattagctagcccgtaacacgtgccaggtgcaatgtaattcactgaatcctcccaacgactctaggaggtaagctatatgaatgtgtccattttatggatgggaaaactgaggttctgagaagtggcagcagtgtccaaggtcatggagccaagatcagaacttgaagctatcagatccaaaatactgagaacacagctggcgaggggggtgggggtgcaggtctaggaatccccatcaaggtagctaagagagcagcctggagaccctgaatgctgtttggggcaaggaattgaagtcatgctctttctttttttgagtcggagtctcgctctgtcacccaggctggagtgcaatggctcaatctcagctcactgcaacccccgcttcctgggttcaagtgattctcctgcctcagcctcctgagtagctgagattacaggcgtgcaccaccaagcccggctaatttttgtatttttagtacagatggggtttcaccatactggccaggctggtctcgaactcctgacctcaggtgatctgcccgcctcggcctcccaaagtgctgggattacaggcgtgagccaccgtgcccggccacgaagtcatgctttgcaagatatcccaaaggaagcccagattctgtgcttataggtttgcccctgggggagggctgaagtcccgtggtctcctgtaccacccccaagatgtaatctccctgcctcttccttgctgggggggatcgggttcccattgctaagcaaccaggtttgtagttggtgaataatgcaatggaggacctagaagggtgaggaaccgaattggggtccctagtgtggggggaagccccttttccaaaactctttccaaacctctgaagccccctctacccttttaaccttaaaaaactctcacccctcagctatgaaaagacttcacacaccccattccatcttgcttatctctaactaactctggaagaacaacgtaggcggcctgggcttctggccacccgcaagagttggtggccatttcatgaaggaggtcatccttgcaatgttgccattgtctttctcaggctgggagcttttaacttctgttggatctcaagccttttctcccaccttggacactgactttaggggcaaaacgtggaacccagtgaccctgaccttccccactccctgcaccacagcagtagccccaccccctggctggactttgggttctcagccctggcagcggaaaatccccgaagaggaaggggcagggggagcctatatctctctcccaccccttgactctttaaggaagggtgacactgatgagcctatggggttggctagccaacccctccactccccgggtccccttaggagagaccactggagctctcggctcccagacaaggccagcatcccccatgagcccctcccaaggccctgcccaccagcccccctgaccccccagacacttacatgggtgtggccagagaccacacctggctctgcagggccatctctgcccagaagttcactttctggtctccgagttctggacccaccacccgcttgcctgaaggtgccccggaggctgtgacttggctgcctggagtgggggggggctgcgggcgggcaccgggagagcaggtccagcgggtttgggccagggaggcggtaggcacaccagagaggggggctgggggctggagggcagttctggggaggtactatcagctgtcctgataaattattcaccagcctctggcctctttgttgcactcagctgcctcccggaaaacactttcacacacgcgtggtcaagcgtgggggtgagagtactgagtcggtgactccccctgccaccagagaatggcatttctacttggcaccccaatcatcttgagtctgactgcctgccaagactcacccacaggagagcaccattgcatagcacacaggctggagactgttttatttttttagagatgggggtctcactctgttgcccaggctaaaatgtagtagtgcgatcatagctcactgcagtttcagactccggggcgcaaacaatcctccctcctcggcttctcaaagtgctgggattacaggcatgagccaccacatctggcagataacattttttaaaattattttttaagaacaggcacagtggtgcatatgtgtaatcctagcactttgggaggcccaggtgggtggatcacctgagggcggagttcgagactggtctgaccaacatggtgaaaccccgtctctgctaaatacaaaaaaaaacttagccgggcatggtggtgcatgcctgtaacctccgctacttgggaggctgaggcagaagaatcacttgaacccaggtggcagaggttgcagttagccaagatcgcaccattgcactccagcctgggcaacaagagcaaaactctgtctaaaaaaaaaaaaattactttttgagccaggcacggtggctcacgcctgtaatcccagcactttgggaggccgaggtgggcggatcacgaggtcaggagtttgagaccagcctggccaacatggagaaagcctgcctctgctaaagatacacattagccaggtgtggtggcacacctgtagtcctagctactcgggaggttgaggcaggagaattgcttgtacccaggaggcggagattgcagggagctgagatcatgccactgcactccagcctgggtgacggagcaagactccgtctgaaaaaaaaaaattactttttgatcgtggtaaaatacacataacaaaatttaccattagtggcatttagtatgttcacaatattatgcaatcctcaccactggttcagaatattttcatcaacccaaaaggaagtgatcactactcattcccctgcctcccgtgcctggcaaccaccaatctgtgtccatctctatggatttgcctattctggactttttgtttttcttttttgtttgtttgtttttttagatggagcctcactctatcgcccaggctagagtgcgatgggcacaatcttggctcactgcaacctccacctgctgggttcaagcaattttcctgcctcagcctcccaagtagctgggattacaggcacccgccatcacgcccagctaatttttgtattcttgtagagacagggtttcaccatgttggccaggctggtcttgaacttctgacctcaggtgatccatcctccttggcctcccaaactgctgggattacaggcgtcagccactgtgcccggactattctggatagttctataaaaatggactcacaggccgggcgcagtggctcatgcctgtaatcccagcattttgggaggctgaggtgggcggattacctgaggtcaggagttcaagaccagcctgaccaacatggagaaaccctatctctactaaaaatacaaaattagccaggcatggtggtgcatacctgtaatctcagctacttgggaggctgaggcaggagaatcacttgaacccgggaggcggaggttgcgatgagccgagatcacgccattgcactccagcctgggcaacaagagcgaaactcggtctcaacaaacaaacaaacaaaagactcacacactatgtggtcttttgtgtttggcttctttcactcagcatcacgttttaaaatttcatccatgtagcgtgtatttatcgttccttaattcttttttttttttttttgagacggagtctcgctctgttgcccaggctggagtgcagtggtgcaatctaggctcactgcaagctccgcctcccgggttcacaccattctcctgcctcagcctcccaagtagctgggactacaggcgcccgccaacacacctggctaatttttgtatttttagtagagacggggtttcactgtgttagccaggatggtctcaatctcctgacctcgtgatccacccgcctcggcctcccaaagtgctgggattacaggcatgagccaccgtgcccagcccccttaattccttttttatggctgaataatatttcatcatatgagtatactatattttgctgatccatttatccattgatagacatttgagttatttccaccttttggaggaaataaaatattctatttattatttatttatttatttgagacagtctcactgtgtcacccaggctggactggagtgcagtggtgcgatcttggctcactgcaacctctgccccccaggttcaagtgattctcctgcctcagactcctgagtagctgggattacaggcatgcgccaccatgcctggctattttttgtgtttttagtagaggcgggtttcaccatattggccaagctggtcttgaactcctgacctcaagtgatccaccccccaaagtgctgggattacagatgtgagccaccacatccagcctatttaattgtttgtagattgattttataactgttaaatatttagatgttggagccaggcatggtggctcatgcctgtaattccaactactcgggaggcggaggcaggaggattgcttaagcccaggaggttgaggctgcagtgagttgtaatcacgccactgcactccagcctaggtgacagagcaagaccctatctcaaataataataataataaggcattattctaggcatgggggcattgggtatagagatgaactagacaaacagaaaatgctattatgcagctcactttctcgtatggggagagagacagataatacacaaatagaaagaaatataaaagcaattggtgccgggtctggtggctcatgcctgtaaacccagcactttggaagcccgagcaggcaaatcaccttaggtcaggagttcgagaccagcctagccaacatggcgaaacccccgactctactaaaaatacaaaaaattagccggccatgcacctgtaatcccagctactcaggaggctgagacaggagaattgcttgaacctgagaggcagaggttgcagtgagccgagatggtgctactgcactccagcctgggcaacagagcaagactccttctcaaaaaaaaaaaataataaaaagaaggctggggccaggcacggtggctcacgcctgtaatcccagcactttgggaggccgaggcaggcagatcatgaggtcaggagatcgagaccatcctggctaacatggtgaaaccctgtctctactaaaaaatacaaaaaaaaaaagaaattatccaggcatggtggcgggcacctgtagtcccagctacatgggaggctgaggcaggagaatggcatgaacccgggaggcagagcttgcagtgagccgagatcatgccactgcactctagcctgggtgacaaagcgagactccctctcaaaaaaagaagaagaagaagaaggctgggcgcggtggctcatgcctgtaatcccagcacatcgggaggccgaggtgggtggatcatgaggtcaggagttcaagaccagcctggccaacgtggtgaaaccccgtctccactaaaaatagaaaaataagccagccgcggtggtgccaccagtaattccagctactcgggaggctgtggcagaagaattgcttgaatcctggaggcagagattgcagtgagccaagatcgcgccactgaactccagcctggttggcagagtgagactttttgtcaaaaaaaaaaaaaaaaaaaaaaaaagaataaaataaaaatgaaagcaattggtggcaactgcaattgggggtgagttattgagaatacctgaaatggggctaaagaaggagtgctcttgtaggctgggttatcagagaccacttccctgaagaagtgacatttgaggtgagacctgaatagaggaaccagccatgtgactgtcatttcaagcagagaaaacagcagtgcaaagaccctgaggtgggaatgcagttgggggaggggttaagggaagtacgaagctgaaatgaagtgacacaaggtgacagtgtgagaagatatgacctgagaagtgggcagggcctgctggggcaaggtagagaattcgtatttttattctaaatttggtgggagcctttgttttatttgtattattattattgttttagagatggtgtcttactatgttgtccaggctgttcttgaactcctaggctcaagccatcctcccgcctgagcctccagggtagctaggattatgagcaagccactgtgcgtggcttgatgggaacctttgagagggaggaggtggctggaaggaacaaggatggagagaagtggatgaatccaaaatctgtttggaggtggagtcaagagagtttgctgatgaattggagggtggctaaagaaagaaattaaggctgactcctggggtactttttggcacgaaaaactgaatgggtgaaattgacacacatggtgaggaggagtagggttggaagaaccaagaatgtggttttggaagtgttcagtctgaaatgtctattagaccggagactgctagatatgagtccaaagcctagcggagcagttagagttagagatataaatttgggagacatcagcataaagattatatatatataatatattaatatattatatatattaatatattatatataaatatattatatataatgtattatatattatatataataatatatttatttatatattataataatgtctataaatatattatatataatatattaataatatataataataaatacataatataataataaatataaatatattattaatttattaataatttattgttgatatattattaataaattaataaatataaaaaataataatataatacatatattatatataatatattaatgtattatatattatatattaatgtattatatattatatattatatatataaatatatatataatatttatatttctatattaatatattatataattatataatattatatattatagatattttataatatattatatatatattagaagtggagtctcaccacttgccacgttgcccaggttggtctcaaactccttgcctcaagtgatcctcctgccacagcctcccaaagcactgggattacaggcgtgagccactgcacccagcgtagatttttttttttgagactgagtctcactctgtcacccaggctggagttcagtggcacgatctcggctcactgcaacctctgcctcacaagttcaagggattctcctgcctcagcctcctgagtagcaggcccacaccatcacgcccacctaaatttttttgtatttttagtagagacggggttccaccacgttggccaggctggtctcgaactcctgacctcaagtgatccaccacctccgcctcccaaagtgctgggattacaggcttgagccactgtgcccagcccagcctagatgtttaaaacatgagattgaaatttgtcagagcctgagtcccaataggaaagattgtgcacttgaggctgggggcagtggctcacgtctgtaatcctagcactttgggaggctgaggcgagtggatcatgaggttaggagttcaagaccagcctggccaagatggtgaaaccctgtctctactaaaaatacaaaattagctgggcgtggtggtgggtgcctgtaatcccagctactcgggaggctgaggcagagaattgcttgaacccaggaggtggaggttgcagtgacccaagattgtgccactgccctccagcctgggcaacagaacaagactccttctcaaaaaaaaaaaaaaaaaaaaaaaaaaagtctgggcacggtggctcatgcctgtaatcccagcactctgggaggctgaggcaggcggatcacctgaggtaacaagttcaagaccggcctggccatggtaaaaccccgtctctactaaaaatacaaaaaattaggtgggcgtgctggcacatgcctgtaatcccaggtacttgggaggctgaggcaggagaatcgctcgaaccccaagaggcaaaggttgcagtgaaccgagaacgcaccattgcactccagcctgggcaacaaaagcgaaactccgtctcaaaaaaaaaaaaaaagattgtgcacttgaacacggtggttgatgagaacttaatagaacccagtttataaagctggaggggaaaccatcaaggcacagtatagacgccctgggttagcaacgcctggcagctgtgaccacctctttgccctggagagagctgtgtagagctactgcctgtagcagagggatgtcaccaatggggcttggaggtaggggacacgggataaactttttcttttttttttgagacagagtctcactctgtcgcccaggctggagtgcaatggtgcgatctcggctcactacaacctccatctcccaggttcaagcaattctcctgcctcagtctcccaagtagctgggattacaggtgcccgccaccacacctggctaatttttagtattcttagtagaaatgggttttcgccatattggccaggctagtctcgaactcctgacctcaggtgatccacctgcctcggcctctcaaagcactgggattacaggcatgagccactgtgcgtggccaattttttttttttttttttttttgagacagagtcttactctgttgctcaggctagagtgcagtggtgtgatcacagctcactgcagccttgatctccctgggctcaggtgatcctcccacctcagcctcctgagtagctgggactgtaggcacacaccaccaacatgctgctaatttttgcattttttgtagagatggggtctcactacgttacccaggctggtcttgaactcctggggctcaagccatctgcccgcctcagcctcccaaagtgttgggattacaggtgtgaaccactgtgcccagctaaacatctttttttagtgttattttatttatttatttatttagagacagggtctttctctgtcacccaggctggagtgtattggcattattatagcttactgcggcctcaaactcctaggctcaaatgatcctcccacctcaggctcccaagtgcctgggcctacagacacaaaccaccatacccagctaattttaaaaaatgtcttctttccttcattccttccctccttccttccttctttccctccctccctccctccctttctttctctctttccttctttctttctttcttcctttctgcagagacagggtctccctatattacccaggctggtttcaagcaatcctcctgcctcggcctcccaaagtgttaaaattacaggtgtgagccaccgtgcctggctgggataaacaccttggcttcactctcctctctttcatcaggtgaccccaaggaagccagaggggaaggaaggtgaaacagaagtctgagaaggggtgcttgtgaagtagaaggaaatcaggagggggtggtgtacccaaagaccaaggagctaatgaagaggaggacagggaatgaagtcagtgattgaatctgccaaacggacatcataggtgctcttgtcagaaaaagctcccagaagccgggcgcggtggctcatacctgtaatcctggcactttgggaggctgaggcgggcagatcatgaggtcaggagttcgagaccagcctggccaacatggtgaaaccccgtctctactaaaactacaaaaaaattagctgggcgtggtggcacacgcctataatcccagctactccagaggctgaagcaggagaatcgcttgaactcaggaggcggaggttgcagtgagccaagatcacaccactgcactccagcctgggcaacagagtgagacttcgtctcaaaaaagaaaaagagccctttcatcaatcttcccgcgtccgccgattcctcctccttggtcgccgcgtccttggctggcgtcagaaaaatggctacaaacttcctagcacatgagaagatctggtttgacaagttcaaatatgacgacgcagaaaggagattctatcagcagatgaacaggcctgtggcaggtgcctcccgccaggagaacggcgccagcgtgatcctccatgacattgtgagagccagagagaacatccagaaatccctggctggaagctcaggccccggggcctccagtggccccagcggagaccacagcgagctcgttgtccggatcgccagtctggaagtggagaaccagagcctgcgtggcgtggtacaggagctgcagcaggccatctccaagctggaggcccagctgaacgtgctggagaagagctcgcctggccaccgggccacggccccgcagacccagcacgtgtctcctatgcgccaagtggagtccccggccaagaagccagcctcaccagcagaggatgacgaggatgatgacatcgacctgtttggcagcgacaatgaggaggaggacaaggaggcggcacagctgcgggaggagcggctacggcagtacgcggagaaggccaagaagcctgcattagtggccaagtcctccatcctgctggatgtcaagccttgggacgatgagacggacatggcccagctggaggcctgtgtgcgctctatcgagctggacgggctggtctgggggacctccaagctgatgcccgtgggctacggtatccggaagctacagattcagtgtgtggtggaggacgacaaggtggggacttacttgctggaggaggagatcactaaatttgaggagcacgtgcagagtgtcgatatcgcagctttcaacaagatctgaagcctgagtgtgtgtatgtgtgcgcgtgcgtaaggccctgccacgattaaagactgagaccggcaaaaaaaaaaaaaaaaaaaaaaaagaaaaaaaaaagaaagaaagaaaagaaaaagaaaaagaaaaaaatgttcccgtgaaagggggccaagaacccagcccagttggcatggctggaggaaggaccaggagatgatgcagtggggaaggtgctatagagaaaactttttcccagaagtatacagcttatttatttatttatttatttatttattttgagacagagttttgctcttgctgcctaggctagagtgcagtggcgcgatcttggctcactgtaacctccacctcccaggttcaagtgattctcccacctcagcttcccgagtagctgggattacaggcgcccaccaccaggcctggctaattttttttttgtatttttagtagagacggggtttggccatgctggccaggctggtttcgaactgctgacctcaggtgatcctcccgcctcggcctctcaaagtgctggcatcacgggcatgagcctccatgcccggccggtaactgtatttttccttctgggcaccccagaatggtggggttgggggcaggttctgggaagagtctgcttccattagggggaaagtggaaaacgtccctaggggagggtggcccgcgcaagggcatcgatcctgcccttgaaccgcatgatccggccccagctgctctttccccctaccctggacgcctcctgtttcctgtctgggcctccccaggcgcccgggcccaaggtgaccgcctttcaactgcaaccgctaagctgcgcccacggcgcactgtgtccgtctctccctcctccctcaatccgggagtgcccttggcagcggacacctcccggatttttccgggaggagaggggaagccgcttctcggcttggcgtgggggcagtggtgcgcggctgggaacctcgctgagcccaagcattggtagggagaccccagcggccagtaaggcggctcctggcgccccctcgggccggagctgtgcgctgcaaggctggatcggagggagggcccaggggcctgaggagtcgctgcctgccggctggcacgaccaagcgggactgcccgggtcccgaaaatacggcttcgggggacacctcaccaagcggctagtggttcagaaccccagtccgacgcgctgctgggcccagtctccgggacgatgacggggacatggctctgaaaaagtgccagggtgcgctcagtagaacccagcacccagaatggccccccagagagcggggccgggtctagggaagccctcttccaagaagtcccgtgccctgaggtgactgggcgcgctagttgatgaaactgagtgccccaccgaggcgcccctgtcccgagggcggggccagggcggggcgggagtcctcctggcaggtgccgggggcggtgcccggccctgcccccgggggccgttcctggaggccagaggcgggtcagagaagccgccggtgcgggcgacgccttggaacccacggccgccactgccgccacaggtgcctcacagtgccctctgtcctcgctctgggaatcaaaaccccggttgggaactgaggcttccgaactgcttccaaccctggacacgaaggcccccaccggccggagaacgaaaccctggggtcgtctgaagaggagggccaggagtccccagggccagacagcgaagccccagagctgctgcggagctgaacaccgaggtccccaagccctccgcaaaggacgtggagatcctggagcaagagagcgaagtcctcgagccatcagtcgagcaggacgcagagagccccgggctgtccacagctgcgggctttgagagtcctgagccaggcagagacgaccctgggccgtccgaagcgcaaagggcggaggtccaggggcagcatccccctccaggccctaagacctcctcctccaggtcaggctcggaagccccccacctgcgttttccgccgtgccccgaggctccccagcgtcccccggaggagcggttcatggagacgcccatcgagcgcgaaatccgccgcagctgcgaacgcgaggagagcctgcgccggagccggggcctgagcccgggccgcgcaggccgtgaactcgtcgagctgcgcgtgcggccggtgctcaacctgccgggtcctggccccgcgctcccgcgcgccctggagcgggcgcgggcgggcgcgcagatgcagcgggacatcgagcgggaggcccaccggcaggcggcgctggcgcgccccgcggtccccgagccgcgcgcccggtcgccgccgcagccgctgggcgaactcaagcgcttcttcgaggccgcggcggggagcggctcctcggcgggggcgggggacggcgcgggcccgcagaggctgccagagcctgggggacggccgcgctcggccgtgcagggcgggtgccgggtgctgggcagcgccccgccgcctttcactccgtcactgctggagcaggaggtgcgcgccgtgcgcgagcgcgagcaggaactgcagcgccagcggcgcagcgtctatggcaccgcggagttcaaggagcctacgccgagcctcaccggtaagccgcgggcgtagcaacgccgggacccccagggttccagccgcccccaccgattgcccaacttcagtggcccctcctgtggccctccgattctcggggtctctccctccaagctcccagaccccctctcaattttgtctcttgcctaccccttctggagctccattactcgctgtgatccacccctccaccgggagtgatggactctctgatccacaccacccaggctgcgcgggggtgggggcattccagatgtcttcctttttgtcgggttccagggaaccctgactgggttctggcactcctgggtcctccctctgaattttcgggctcctgcttctccattctgggttcacctccctcctccctcgggttcctgggtgcctggagttgaatggaggctttcatggggaggcggagggtgaacgcctgtgtgtgtttaaggggtgcggccggcctttcatcctggctgccgccagctggtgagctgagcgccccttcccccgcagcgagcaggggcgacggaaagttggtggtgatctggcccccccgcagaaaggtctcggagaacggcctggagcaggtgggagcccccttacccgtgtgcctctagcgcttgtcggtccccccacccctccggtgccaggacgcttggtggggaaaagtgcatcctccctggagggccactctggtcagaactcagtctgggacgcatccccggggtgaagaggagacggtggtcttgaggcccaaaccgccaccccgagcctggatgcagtgcgcaggtccctgaggccggccttccttctggtcctctgtccccaggaggagcgcaaaccttgaggtttgaaaaggctgggacccccggccggaagtaacgtacgcgtcagaggaacagggcggggggcgtctagcattaggcctggagaagggtcggctctctgcattggggaagatgaaatcgacttgcctttgtgaaattgaccagccccctctataaaacttacagtcccccattgggaaactgaccaccacccacaactccgccagtgaaactgcccagcccttctctgcctaattgcaaactgaactaccctctcccttgactgttaagagggccggagttaccgcctcgattgccccactccccccacccccaataaagcctcttctttcagggcactgcagcctgtttttttctgggtcctcttcgtctggggtggggcgggagcacggcgggccgagggaggcccgagaaaaccccaagaggtgcgggccggaatgcgggaatgcgcccttaccgccctgctctggggctgcccgcctcccccggcacggccagacacggcctggcccaggtcctaccgccccctggcggcccgggcgcaaaatgtggcgcgcttaccgagttcacaccctctcgtttccaggcttcctcgtcaacatttattggtgccaacgatgtgccctgcgctgggcactggctagacagtggtgataagaggctgttcctaccctgggaacgtaaacaatagctactaaaaaaaagaggtggtgagggttcaggcttctcaacattattagttcctaatgatcaccgttcttcttgacctcatgggtcctcactatgagacgtgctcattcgtggtgttgggtcaagagtttctgctttccaaaagcatccgtggccgggcgcggtggctcacgcctgtaatcccagcactttgggaggccgacgtgggtggatcagttgaggccaggaattggagacgagcctggccaacacggtgaaaccccgtctctactaaaaatacaaaatattagccgggcgtggtggtgcatgtctgtaatccagctactcaggaggctgaggcatgagaatcacttgaacccaggaggcggaggttgcagtgagccaagaacgggccactgcactccagcctgggtgacacagtgagactctgcctcaaaaaaataaaaaaggcaactgaaacctggcttttaagagagaaatctgcatttttatgattgtgactatttaggaaaaacttttttttttttttgagacagttttgctctgtcacccaggctggagtgcagtggtgcgatctcagctcactacaacctttgcctcctgggctcaagcaattctcctgcctaagcctcccgagtagctggaattacaggtgcacatcaccacaccggctaatttattgtatttttagtagagatgggttttcaccatgttgtccaggctggtcttgaactcctggcctcaagtgatctgccggcctcagcctcccagttttttctaggcgccctgcctagaaaaaacttttaaagttgtgcgggaggagaggaaggaaggaagttggcaagcaacaactgtttgcaatagggcctgtggctgtcaatttgcaagctctggttaatttctctcccctggatgggggttcaagagggtgggtgaacaccctaaattgtctctaaaactgtatctgcacagttaacattctgggactatttttacagtgtcttagaagtgcactgagggcctggcgcggtggctcacgcctgtaatcccagcactttgggaggccaaagcaggtggatcacgaggtcaggagatcaagaccatcctggctaatatggtgaaaccccatctctactaaaaatacaaaaaaaaaaaaaaaaattagccgggcgtggtggtgggtgcctgtagtcccagctactcaggaggctgaggcaggagaatggcgtgaacccgggaggtggaggttgcaatgacccgagattgcaccactgcactctagcctgggtgacagaacaagactccatattaaaaaaaaaaaaaagaagtgcactgaggaccagacatggtgactcatgcctgtaattctagcactttgggaggccaaggcaggaggattgcttgatcccaggagttcaagaccagcttgggcaacatagcgagacactgccccaccccatctctacaaaaaattaaccgggtgtggtggcatgtgcctgtggtcccagctactctggaagcttagcaggagatcgcctgagcctgggaggttgaggctacagtgagctatgattgaaccactgcactccagcctgggtgagagtgagatctgtaacctaagaaaaaaaaaaaattcactaagaccagaaaaggggagacccaggaagtttaaatttaaaaatgttttcaattttggagacaagtcttgttctgtcacgcaggctgcagtgcagtggcatgatcacagcttactgtaaccttgatctcctgggctcaagtgatcctcctgcctcagcctcctgagtagctgggactacaggtgtgaaccaccacacccaacccaggaacattttagaatcgctgtttcaactcttggctcttgagatcgtgtcactgcactccagcctgggtgacagagcgaaactctgtcttaaacaaaaacaaattcttggctctgtccaactctgtctcttgtataggggcatcaaatgtctagtgaaatccatatgcataaaatacagagaggtcatgctgatacaaggctgcacccaagagcagctcagcccatgaagggctcatcagctgaccccatcctcagcccagtgaccccatcctcagcatacttcactgtgactgtgggagctatgtagagaaaggcggagagagcctgggaaggtggaaaatggaaacacctagaggctggtcttaatttccagcaggggagccaagaactaagtatgtcatgagtggacaggggccgggcatggtggctcatgcctgtaatcccagcactttgggaggccaaggtgggtggatcacctgaggtcaggagtttgagaccagcctggccaacatggtgaaaacccatctccactaaaaatacaaaaattaggcctggtgcagtggctcatgcctgtaatcccagcactttgggaggctaaggcgagtggatcacctgaggtcaggagttcgagatcagcctggccaacatggagaaaccccatctctactaaaaatcaagaaattagccaggcatggtggcgcatgcctgtagtccaagctactcaagagactgaggcaggagaatcacttgaacccaggaggcagaggttgcagtgagccctgagattgcaccactgtactccagcctgggtgacagagcgagactccatctccaaaaaaaaaagagtggacaggactacttaagtatagatgagggattctctaacttttctgaatattaaactcaactgaggcccccatatgtcaagtaaatcagaatgggggaagggcttgacatcagtattttttgaagctcccaggtgattacaatatacagctgagtctgagaaccatgaagtaaatataaaccagcagttctcaatgtagtggcaccaggaccagcagtatccgcaatgcttggggaattgctagacatgcgccttccaggggccaggtgtggtggctcatgcctataatcacagcactttgggaggctgaggtgggataattgcttgagtctgggagttcaagaccagtgtgggcaatatagcaagacaaagtctctaccaaaaaaaaaaaagagagagagaaaaaaaagcactttcttgggtctcatcccagacttaatgatcaaactctccatgtgattctgatgcacactaggaagtttgagaatcaagggtgtagaaagctgctcagcaacaggacccaggaaacaaagcttgtttccttccccttccagtactgtactgtcaccacccacccgaaaccctgtcttaagagacagtggatttgacttaaaggagaccgtctagagctgcttgtggctagtctgaattgagatatgttgtaaatgtgaaatgctagatttcttttcctttttttttttttttttttttttgagatggagtcttgctcttgttgcccaggctggagtgcaatggcacgatctcggctcactgcaacctccatctcctgggctcaagcggttctcctgcctcagcctccagagtagctgagattaccagcacctgccaccatgcccggctaatttttgtagttttagtagagatggggtttcgccatgttggccaggctggtctcaaactcctgacctcatgatctgcctgcctcggcctcccaaagtgctgggattacaggtgtgagccactgcatctggcttttttttttttttttcagatggagtctcgctctgttgcgcaggctggagtgtagtggtgcgatctcggctcactgcaacctccatctcccagatttaagcgagtctcctggctcagcctcttgaatagctgggatcacaggcgcccaccaccacacccaccttttttttttttgttttttttttttgcatttttagtagagacaggattttgccatgttggccaggctggtctcgaactcgtgacctcaagtgacccacctgtctcggcctcccaaagtgctgggattatgggcatgagccaccatgtccggccaagatttctaagacagtacaaaaaaggaaaatacctcaataatttttttacatggattatacattgaaataatattttgggtataacaggttaaataaaatatcacgaaaatgaatctaacctcttaattttttattttttatttttttttgagacggagtctcgctgtgtcacccaggctggaatgcagtggtgcgatctcggctcactgcaagatccacctcccgggttcacgccattctcctgcctcagcctcccgaatggctgggactacaggcgcctgccaccacgcccggctaattttttgtatttttagtagagacggggtttcaccgtgttagccaggatggtctcaatctcctgacctcgtgatccgcctgcctcagcttcccaaagtgctgggattataggcatgagccacggcgcctggccctaacctcttaatttttttatgtggttactagaaaatttgaaactacatacgtgatttgcgtttgcagctcacttgatatttccattggaccccacgagtctaaagaatcttaaaggccgggcagggtggctcatgcctgtaatcccagcactttgggaggccgaagcgggaggatagcttaagccaggagttcgagaccagcctggtcaacataggaagaaccccccccttctctacaataataataataatataataataataataaaataggggcatcgtcgctgcctgtactcccagctgcttaggaggccgaagtgggaggatcacttgaacccaggagttagagtttgcagaagttggaggttccaggattgcgccattgcactccagcctgggtgacagagcaagacccttccctccccccgaaaaacatcttagagccacaggaaaactcacagggactccctcaaagcggtatcagggagcatcaggatttccttgatgtcattcagaccacagctgtggactaaaaaacatccttgatgcagtcagaaattgtcaccagaaatacccatggaagagcaatagtggccgggcgcggtggctcacgcctgtaatcccagcactttgggaggcagaggcgagcggatcacctgaggtcaggagttggagaccagcctggccaacatggcgaaaccccgtctctactagaaatacaaaaactagctgggcctggtggcatcagcctgtaatcccagctactcgtggggctgaggcaagaaaatcacttgagcctgggaagcggaggttgcagtgagccgagatcatgccattgtactccagcctgggcgacaagagcgaaactagtgttggcattcaatattgattcatttcacctctaacgtccttttttatcatctggaaatggaggctaatactatgtgccagggactggaaggtaggtgctttgctcaaaatcataaataagggcagggctctgggtgtctcctctatgaaaatgctgccgggggcggggggaggggaggggaggggaggagaaccaaaagggtccctcttggattaaaggggtataacccgcagctgagtgacacctggctcaggaggacacccttcctccttgcaacgggccacaagtaccgggttgcgatcacaagtacccggttcaggtccaaggtccgccacttgctcgcaggagctttgagcaggtgagttcatttctctcagccagggtctcctctccagtccgagattagagagaggctgagagatcctaagcttggataccgtagggctctcccaccttgtccgcaccccggataccccaagaaagacgacgacctgtccggcccccaagtcccaaaagctggaagagaaaaaaaaagtctaactcgggcccttaggaaactgatcgagggcactttcctggggcgcgtcgggaaaagtagtcttctacgctaaaataaataacttccgggtcaaaatatgggagtgggcgtagccttaagtctcttcctccagtggacgttgaatttccccggtaccctaaacttgcagttttctgggttccggtgttgacgggcaccacttccctttttgcttcatgtgcgcctatgcgcatgcgccaaactctcgtccgcctattggcgaattccaggcttctttcaaaagactacatttcccagaaggccacgcgagtgggtggggcaatcccccgggggaggggcgcggcattcgcagcggacgctgagcctgtgacctctttctttcttttatttaacacaaaactgacgtgtccgcattcagggccccacggccaagccggactcggtgcagacaggtcagctcggcctggccctttggaaggcgaggccgggctgcactgcgagaacgagtgagcccctcccctgccccctattctggagtttggaactgtcaagttccagctcctaccctcttccccaggttcaagacccctgcgctgcccaccccgcaggcccggctgcgctcggaggccgggcctggcctgcctggcccgtgaggatctgcaccagcaggtcggtggccagcgtgggcgtgggctcctcgaagccgatggtcagcagctgctggtagtccccaagcggctgcgggcacaaaatcctggggtgggggggccagggatagacaggcctggacttgagtgccccctgcccctcgggagtccctccctttgagtgagaggctcaggtgaaagaggctttgtttcagctgcgggtgggaaaaacccccgggggaaacttgtttccttgttgatcagagacttagtaatggctcctagaggctgaataactggtcctgacctgtccattcgctctgctagctgtgtgtccttgggcaggtaacaacttctctgagcaccctgttttctttgttaaatggggccaatagcatagatctccatgggttgttactggggtctgcatgaagtgcttttcagggcacaataaaatgctatcactactaagggaagcaaagtgtttgggaaggtggattgtctttggtggggttctgcctccccctccagctcccaggcccacgttgctattgccctagctcctaccatgaataaaggtcatcctcggctggtcctaggggcacccatcggccgatggaccacagcttctggatctgtgggcacgaattggctggactctggcctgtgtcttcccaagtatctcgatagcacagaaagtagctaggaggggagggagctgtaattagaagtgatcagcttcctagctacttctgttgagggctttaattttggagttgaggtgggaactcatcagaagttgccctgaagttctcaggtaggaatgtgactccaaggccttttctccctgccagcctacttttaagatgagaacttttattttggtgggagggtgggttttaagaaaatagaggtagcctttcaaaagcctttagtttcctggttcacttttttttttttttaagagacagattattgcttccactcagggtggagtgcagtggcacaatcacagctcaccgtagccttgattcctgggctcaagtgctcctcctgcctaagcctcccaagtagctgggactacaggtgccagccatcacgcctggcgaatttctttgttgttgagacagggtcttgccatcttgcccaggctgatctcaaactcttgagctcaagtgatcctcctgcctcggcctcccaaagtgttgggattacaggcgtgagccactgcctcgggccctggctcacttttcactttgctggtgacggtttggagggtcatattggcattcatcatagaaaggggaggactttgatttgggtaagaggacttactaatccacaagggaatcttgtccccgaccaggggcctctggggtggcttccaggtgccagcgcatcttcttatagaggtagcgggggaagcggctggcagtgtaggcggttggggcacagtatctgaagatggagacctcatgggacaggctgatggagaacctcccgcaaaagaaacaggagatgctggcgagacatgagagaatggaggggtgaggctgggccttggactccttcatccccccatctgagtctcctaccattttacctaagggggttcatctcctccaggtccacgaacccaaaggaagcgtacatgaggaccagctgttccaggcgcagggtcagctgttgggagatctctaacagctgcatacaagaggggggtacagtgagatcagctggcctgcgaggagtgggcctccccctccaccatccccacaggctcagagctgcgagaagaaaggggcgtggggtctaagaaacctccacacaccccctttcggaccagctcctgcaggggtccatagatggggggtatgcttctcgcggctgcctccaggtacaggaagtagggctcacacatctgtaagaaggtgggcatggccttggccagctgctccttctgtacttggtctctgctgaaggaagaagggggcctttgcctggaatccctcacaacccctccccaccccgcagttttccccattctactcaatcccaacctgtatccctggctttgacccattagaaaagcccccagtttcaggtcttttctgaacatctttctggtttacctgcatcaaacccatttggaacacttgttaaagtgctgacacctgagtctcacaacacttaggacccagagcttcctgcagggtctgggcgcagtggctcacgcctgcaatcctagagttttgggaggctgaggctggaggattgcttgaggccaggagttccagacaagcctaggcaacatagcaagaacccatctctacacaaaaataattagctgggcatggtggcacctgtagtcccagttacccaggaggtggaggtgggaagattgcttgagaccaggagttcgagggtgcagtgagctatgactgccccactgcactccagcttgggtgacagagcgagaccctgtctcattaaaaaaaaaaaaacagcctcatgagaatccctcgaacctgggaggcggaggttgcagtgagctgagttcgccccactgcactccagcctaggtgacagagcaagactccatttcaaaaaaacacataacaacaaaacaaaacaaaaaaacccagcctcgggtaggcgcggtggctcacgtctgtaattccagcactttgggaggccaaggcgggtggatcatgaggtcaggagctcaagaccagtctggccaagatggtgaaactctgtctctactaagaaaagaaaaaaattagccgggcaacacatgttggtgggcgcctgtaatcccagctactcgggaggctgaggcagagaattgcttcaatccgggaggcggaggttgcagtgagctgagattgcaccactgcactccagcctgggcgacagagtgagactccatctcaaaaacaaacacgcaaacaaaacccaacccagcctcctaggaaattccaatggacactgaaattgagagtcacagggaaacctggtctgggaatcacattatcctttggagtctcaaactgatgtcctgcaggccaagtttggctcaggtgggtcttgtttagccagcacagggctcaaaatgtaagacagcacttaaaaactgggagaaaaagtcctagagacttgacaaccccaggcccacactgccacgacagtaatagcagccatcccctacccgcaattctacagtcttcctcattctcttaaactggattctaatatgctagcttcttccactgtctccctctggctcctagcgcttgtaattttgcgaccctggtgtgtgtcacccatcctgtcgcctcccctccaagtctccttacccatggggacctgggaccctgtccagcatcacctgtagagcaagtagctctggaaatcatctgccttcttcagtaggtagcgcagctgttgggtgatggggctgaacaaagtgtccagggataggcggggaggtgctggcccaggccgggggaccagaggtttgggggaagacgtggaggcccgggcctcagccagccgcccctcggcatcttcaggatccggctcagatgggttcccaggcctgccagggggcgtcgacctggaggggtctccgcagggcggcgtcccaggttccaaggcgtctggaggcggtgtttctccagggtccagggggagcgacccctcgaaccactgctctgtagccatggtagggccggggggcgggaacctgagctctttaagcttccgctgctgctcaggttggccgcgggttcgaccccgccccgggagcctccgactggcccctgccttgacctctccaccggagccgcgccgccgcgccgggggccgttcgcctcttttgaatttcaacacgcgggaggggcgcgcctctccagtccgcgcgcctgcggccccctacccctgcacacgcgccgcacgcgctccaggaacctggcggtggggagggacccgcctagggaggtggcctctggccgtgtcctgggggtgtggctagggccgggacctttatctctcgaggtggattcctagagtggaggggtctctaaacgtgtctccaacccctcaacccggcacaggtatatggaatgaggccgcccaggccccagcccctcactcccagaacgctttttgttgttaaaacatttttttaatttaaaatttttagagatgggggcccatgttgcccaggttggtctcaaactcctggactcaagcgatcctcccgtgtcggtctcctaaagtgcccagcctctttttttctttaaaaacaaaaaacaactctaatgagttgagaaactgccttagaacttagtagggactacttagaacttagtagggactttggatgtagtaactctggcgactactactaacaataatttttaaaaatcttcaggctggacttggtggctcatgtctgtaatcctgacactttaggaggctgaagcgggaggactgcttgaggccaggagttcaagaccagcctaagccacatagcaagaccctgtctatacaaaaaccaaaatattagttgggtgttgtctgaggcatgagaatcacttgtacccaaaagttcgaggctgtcaccacagttatgattgcaccagtacactctagcctgagtgacagagcaagactctgtcttgaaacaaaatcttcacttggaaatcttctatctcatggtctcatctgatggcccagaaggaattttctgttgttttaatgaagaggaccatgaggtctggagacactactatggtccaagaacagatccctgccccaatatttgtagtggattctttgcagtagacaaaggctgacaggtttatagtttttaatgtacattatgtcaaatacgctaattatatttaaagactctgagtgaagaactcagacaggtgtcagatgccaccctgtgtgacccggggcagacagcatctctgtgccgggccagctgcctcttctgtaaggtgggattttatgagttttttgtcttatggggacttgggaggacagttgaggaaatgcttataaacccaaggacttaactgctagccattcaacaatatttgaggccaggcatggtggctcacgcttgtaatcccaggcagaattgcttggctgggagttcgaggccaacctggccaacaaagtgcataccctcatctccacacacacacaaagatttttttttgagacagagtctcactttgtcacccaggctggagtgcagtggcacgatcttggctcactgcaccctccgcctcccaggtgtaagcaatcctctgcctcagcctcctgaatagctaggattacaggcacccaccaccacgcccagctaatttttttttatatttttagtagagacagggtttcatcatcttggccaggctgatcttgaactcctgacctcatgatccacccacctcggcctcccaaagtgctgggattacaggcatgagccactgtgcccggacaaaaatttttaaaagttagcccggcatggcagagtgcacctgtagtcccagctactcaggaggctgaggtgggaggatcacttcagcccaggagtttgaggctacaatgagctatgatagcaccactgcactccagcctgggtgaaagaatgaaacctgtctaaacgaaaaacaaaaattgagcacctgctgtgtgcctagctctgttctggacacggacacggtgagattacagaagaaaaaaaagcaaatattcccaccttcctggagcaattattgttatacatggctgtgaggcagctataattcattgtttctgtttttctccctccccaaacaattctgtcctaacctgaggctctcttaggaggctctttagtgccctctccccaccccattcataaaatggactccgtggcttttttttccctttttctttttttaaaattttatttaaaaaaccttcggtgcaatattaaaaagcaatacagccagctggagcgacaatcaacagaaagaaaagagggaggagagaaaaggcccgaggaaccccaacccagctagtcccctaggggctggaggccaggggcagactgagaaggggggcatgggtggtaggggagggaggaaagaccacccaccaaaataaacaggcagatccaaacatttatacaggaaacatctggctgaacggaagaggatcttggggagatgagaagccccccacatttcattttttttttcctaaaatgtcctggactgggtggggagggtcagccacctggggtttaaggagcaatcccctccccacaccgacgtgctgaggagcagatgtgtgtgagacagacacaaggggcaaagataaggacaagagggtgccctctccttggaatctgttatgagggctgagggtgtccccgtccagctcctggactctgggggatcttgggtgagatgggggccggaatgggctggggcaggggtgaggctgggcgctcagcctaagaagccatcggggtcatcatcctcaaagtggccttgctgaagcaccttgatgtggtgctcgtagattttcagggctggcccgaggcggatggacaggccggtgagcacatctgtgcgctgcatgagcagcaaagatttgccatcaatttcctgggtgggacaggaacagagagagccgggatcagggcacatcccagggaggccctctgtgtctgtcagtgtgtagtcctgggctggaaactcacctgctcttggaaagctgtcgcctgctccgggaatccagcctcagtaaaatattcgacgacatccatcacggtccactcgacgggatcagatggcttctctttgcgcccgggactgcatcaaaacaaacagacaccagtgaacacggatgtctctctggctgtaccacacacctgagcagcacccccatgtctccaataccccaacttacggacagccaaagggggtcccgtcggccccaggtagggctggtttgcctgggggcaaaggcacgggggacggggagtctggcccggtggcaacagaagctgggaaggaaaaaaacacctgtctttggctttgtcttcgggctgagttcctctccacctagcactcttccccacccagagggatccttacctgttcccccttccttgttcatggctgccatggagaacacctggcgggtgccgctgcccggggctggcccccgcccttcatcctggccctggtgcggtccgcagggggtccactccttgaccctctccttggcactctgaggtccccgctcgccgttaagctggtggtgctgggcacctgcaggacggtcactctcgggcacttcagagccctctgacacatcatcttcttcatcttcatcttcatcatcatcttcttcctcttctttctcaagtactcgctcttctccacctctctggagccgaggagagaagcatgcaaaattagtagctgttctaatcccagaccctgactgtggcgtccgggcggtggggaggaggaaccgattccacctttaagaacaatacggactaacttttacgcattcactccgtgccaggctctgtgttaactaaagccctcgacaaccaaatcttactaaactcgctcaacaaccccaaggggtcgctactgttattaaaccgcgtttacagcggaggaaactgaggctccgggagattcaatcacttgccaaggtcaccacgcaccgagcccgcaggaaacgcgcgcaaagccccagccacccgccacccagttcctcccgggactcgcgcccccgccaccaacttcgcccgcacctgcccaccgcgcggcgcccccgctccccggcgcgctcaccttgctgcgagacgggcgggcgctggcggccggcggcgcccgtccgggcctgtccccgcggggcagcgcaagcgctccgagacgggtgcgctccagacggcctcgagccgccgcctcctcctccagcagcccctgcacgcggccgcgggttaggcgaccgccggcgccgccgctgcccccgaggtagcgcacgacttcccgcaggctcacgggccgcgccgcgccgccggcccgcaccgcgcccccctccggcggcggctgtggctgcggcggcggcggctgctgctgctgtggcggcgccggcggggccggcggggtggctccgcgccggggcggctggacgcgcgccgcgttgcggtacgagatgctccccttgtagctgacccggagcacggcgcgctgctggatcagtttctcgagctcggcgcgcgtgcgctccggctccgggccgtgccgccgccgcaccatccggcagatgcgctccaggtccggccgcgccttgcgcgagcgcagcgagtcgatggtgtccaggatccactcttggtagtgcggggaagcggcggacgacgaggcggcggccgccgtggtggcggccgccgccgtctccggcgggggtagggccgggggccccgccatgcctcccgcccggcccggctgcaccgtgcgcgctgcctccctcccagcgcggcgcccccctccccggctcccctccctccgccgctgcccgcctcctccgcctccccccccggggggcgcagcgcctcggcggagcggcggcggcgctgctgtttctttgcaaaaaaaaaaaaaaaaaaaagagagagagagggagagagagagagaggaaaaaacagtgagagagaaagaaaagagagaaaaaaatatgcacacactcactcactcgcacgcacgcacacacagacccgcttctgctgggcgcgcgcggggccggggatgcgagggggaggaggggagcgcggcgcggccggcccctccccgccgccgccgccgccgcacgcgcgccctgcgcccgggacactccggccccccttccttccctccctccctcctccccgccgcccgccttcctccctcccacccccacgcgcccgcttttaaggtggagcccgggccccccgcccgccccctttaccctgcgctctcgctcactccggctcgctccggcccccccttacaactcccgcgcgctttttaaggaggcgccgcggagttggcccggggcgggggcgggggaaagcggcgggcgggggagggggaggggagtgccggggggagtggagagggggcgggcagggcgggcgggcggcgctcggccgccctccagccattgggcgcgggacccagacgtccccggcgcccagcccccctctccacgcctctccagcgcgctccgctctcgggaccgcacttaccgggaactcgccgcccgcgggccggggctgccgcgctcgcagggtgctgcggggaccctcctgctgccgccgcccccgcgtccctcaggcgcgcctggcccggcgctgaggatgcgggaaggggggcgcgcaccctctcccccttctactccccctgccagggccgcccccgccgccgctcggcctcctggcgcgccagccccagcgcctccctagagcgccctctcggtcccgggctggacgccgagggggcgcgccgcagatttggggaccccgaatctggggtcaaagggcagtttgacgctcgtttctcctgcggggccgaaggagtgccggaatttcagctaaaccctggttacaaggacttcaagccaggacctgatcggcctgcacgctggggtccgaaattccctttccaaccccctgggggtgtgtgggtgggtgatcgaagtcgagaacaccagcgacactttttttttaaacaaaactttattggtaatagttttcaaatatgtttacaacagcacactgttcaagaggaagtctcgtccttcgcagcacacaggttgaatcgcccccgcacccacccggggccccaccccaggcctgagaactcctcctgggatggggagaagttatgagagggggaaatacggggatgaatggggtggctccccagcggctccccacttttctattacgagagaaaaaagcacaaatgagaaagtgggggagaggtgatggacagctgacagctaagctggaggaggggcgcccaggatgggggaggcggaagctggtgggtgagtaaaacaggcagcccctccccagcagctctagccttgaaccccgggccgtggcttggggggacttggcctcttctgttcccttttgcagggatgccctccccactcagctgagggaaggctggacgttaaaatctagcggagaataaaattaaggagttggggggaaacgctgctgggaggaaagacttgggcttggggctccccctctgtctttttgggggatgactcctctttggcagggagaggggcagctgctttgtctggctttcaaagcccaagggtgaagacaggtctgttggggaaaaagagagcggaggcttcctaaaggggcctagaccctcgcaggattggcagagaggattccccggggaggggcccaggggagattagcagcggggaggttcaaaccccagcgcctccctttccaaagtcagtctgcttctctttaaaatggatttgaggaatggggggacatgggaggggtgggagtagaggaaggagggagggaggcactggtggaacttaaataagattttaaattgttgtttttttaaaaaaattctagcaagcaacccactgaacatgtcactaaaaatctctccttcccaggcaggattactccgaaaggaaggttggcgcttcgttcatttgcccttagcaagtggggcctgtggttgggtgggatgggggtgtgggtgggggctggagttaagcgtgagcccctctttccataccctgtccctggatacaccagcaagacctggtctgactggagttgagaaactcgtttaaaacaggcagaagtgggctgggagggctgaggggctggggggctgtggggaaagaggaagggaaaagtgggagagggggcaggagggtgaaggggatgagggggagcagctggtgtttctgtccctctgattatctgggcttcctgctccccctaaccctggagggtggggtgggggtgaaattagatgcaaggaactctggggccctctggctgttcaatccaaccctcccacccccccgaccaaaaaaaagaaaaaagaaaaaagaaaacccatgggggcacaggcatgcccctaaaactcagaaaactccttgccacacttctcattgatggagacccggatttcttcttcctcatagtcgtcaaagttactcgtatccccagggcctttaaactttggtatgaagggagcttccacctggagagggatcaagaatcacccagacctcagcattcaacataatcattattacaacaataaatgcgaatggcctaacattcaagagatatttactctgactcaggcctgtgcttaccattaggttatggattcctcttaacagcccgaaactcttaatgtagcaactcatcaaaggggaaattacttcccagagagaggcatctgttgcacaaggtcatggaatggccaaatgaccccagaatcccatttctagaccccactgctctaagctctctactctaggttgctcctgaacctgtgttctcttctctatttctctattggctgtcctccctgactcttggcctgctcccaaaccctcagcaggcttaaggaggggaggcccaccttcctctggtagatggcaatccagtcagttgtggcaaaccacttgtggttcttgatatcgttgaccccattcttgaggttcccaaagcgcttggtgagatctacctgcaggaggttccgcagcaggtccttcaagtcagagctgaagtgggaagggaagcgcacctggaggaaggggtacaaggacagggtgggaagctggtctggaacttgggaagcccatgatgcttctttctccatccaacggtcctactgggtgtgggcctccaaagcagagtgcctgccagcatcttgtaaaacagctccttgagcctaccctacagtttccaatttaggaagtctgatactgtggcctgagaatctgcatttctttaaaaactttaaaaattcaagagttagttattttaagaagtttttgtagagacagggtctcactacgttgcccaggctggtcttgaacttctaggctcaagcgatcctcctgctttggcctcccaaagtgctaggattataggcgtgagccaccacacccagcaagaatctgcatttctttttttgaaaaaaaaaaaaaaaaaaaaaaaaaaatagcctcactctgtagcccaggctggagtgcagtggtgcgatctgggctcactgcaacctccgcctcctgggttcaaggaattctcctgtctcagcctcctgagtagctgggattacaggctcacgccaagacacctggctaatttttgtatttttagtagagacggggtttcaccatattggtcaggctggtcttgaactcttgaccttaggtgatccacctgccttggcctcccaaagtgttgggattacaggtgtgagccaccgtgcctggcccaagaatctgcatttctaacaaattccccagcaatggtgctgctggaaaggggtcccttttaagaaccattgctctaaggcaagtgctatgatgatttccatttcagagaaggggaaactgaggcttgggttaaacagctcttcctaggtcacattgaggtgtgtgatggggcaattccatctcaggtctactggactctagaacttgcattctcagctgctgctgctgctgcttaaggcatctctgctggggtctggagacttctgaaatattcttgcttatgacaaactttttctctcctctctttctgcatagctaaggctcttccgttctttaaagcccagctcaactcttcttgaaagttttccccaaaccctctgagcccacgccttgtatgcaagtcatcactggagttatagttgcaagaaacgacttcttgttcctgctgtgcctcttacacgctgtgtgaccttggccatggcccttaacctctctgggcctgcgcatgcctctcagatgtggggcagatatgccagggctgcacgagggagataataccactgacggtgcgggggaactagaaaatgctacaaagaagggagtcatgtgcatcttctcctgtgggatcttctgtgtttttttctttcttttttttcccactctgggacatttttttttctttttttcttttttttttttgagatggagtcttgctctgttgcccaggctggagtgcagtggcacaatctcagctcactgcaacctctgcctcccggtttcaagtgattctcctgcctcagactcctgagtagctgggattacaggtgtgtgccaccatatccggctaatttttgtatttttagtagagacggggtttcaccatgttggtcaggctggtcttaaactcctgacctcgtgatccgcccgcctcggcctcccaaagtgctgggattacaggcgtgagccaccacacccggccaactctgggccattttcttggcagtttcttttggtccggtggcagatgcctcatctttccctttttttgagacagagtcttgctctgtcacccaggctgaagtgcagtggcgcaatctcggctcactacaacctctgtctcccgggttcaagcagttctctgcctcagcctcccgagtagctgggattacaggcacccgccaccacgcccagctaatttttgtatttttagtagagacagggtttcaccatgttagccaggctggtcttgaactcctgacctcgtgatccacctgccttggcctcccaaaatgctgggattataggtgtgagccaccgcgcctggccttcatctttctcttttagtgatgctatgtgtccagctggggcaccccacttgcctgaatttttttaaaagacagggtctggctctgtgacccaggctagactgcagtgatgcaatcacagctcacagctcacttctgggctcaagcgatcctcctgcctcaccctcccgatgagctgggaacacaggggtgcaccatcacgcccagctaatttttagttttttttttttttttttttttttgagacagagtcctgccctgttgcccaggctggagtacaatggtgtgatcttggctcactgcaacctccgcctcctgggttcaagtgattctcctgcctcagcctcccaagtagctgggattacaggcgcccaccactatacccagctaattttttttgtgtgtgtttttagtagagacggagtttcaccatgttagtcaggctggtctcgaactcccgacctcaggtgatctgcccgccttggcttcccacagtgctgggattacaggtgtaagccaccgcgcccggccagtttgtttttttttttttttttttagagatggggtctggctatgttgcccaggctggtctggaactcctggcctcaagcctccacttcccaaggtgctggcattacaggtgtgagccattgtacccagccccaaagtttcaaagccagtcggtggcagagctgggactggggcccaggctgagcctgagggtgctcccaccacagtgtcatgactccgggccaaccaaaagctcctgtgtaggagatgctggaccaagtcgggggatggtcgggtcttcccagcaaggtggttgagctgagggcagaggtggggtccccaacctctctccggccatcagtgcctacaatgattgcctacggtgattacctactcaccaaagtgtgatcttggccaagacacatcccttttcccagcctgtttcctcacctctcctacagagggtgccactatctcagggtgtgactgatggggattctggggcctggtggatggtgggcactttgcacctgtcatagatgtgagctgagatggcttcaccacccctcatctgaaccctcagagttaggcaagtctgggtttgggagaggaagcatgggctataaatgctaagtgagggcaatcctgggtgaggctatggacagcacctgggaacaggaaccaaatacattcgtttttctgccttggaatttgcgaaaactcacactaactgggatgaggagcgaaaaggagggtcgtctggcagggcggtttgtgttctgtggccaagatgttcccgtgaggctcgggattttggaagcccatgggattctggaaccgcggggttggggctggacagcaagggggcttgaggtgttggcctcagtgtggccggcgcgtccagcttcaccacctggcctgacttaaggaacttctagattattctgacaacaagcagggctccccagggaataggatgggtgagcagggaacggtctgtttcttccagggctgtgtccccacatccggacctcaccttcccagagacgatcttctcatagatctggatgggctggtctgcgaagaagggcgggtagccagcggccatttcatagataagaacccccagggcccaccagtccacggccttgttgtagccctggagcaagatgggggggcacagggtgaggaggaggcgagagcaggagagcagagccggcctcaggggaaggggagggctggggaggctcctactttgctcaggataatctcaggggccaggtactcaggggtgccgcacaaggtccaagtgcggcccttcacgcgcttggcgaaaccgaagtctgtcacctgtgggcacaagaacaggcagttggcagggaggaagggtccaggccacggcttccccagggctgcccctcgcccggcctggtgggcacctgaatgtagccctgctggtcaatgagcagattctccggcttcaggtccctgtagatgagatccagcgagtgcagatactcaaaggtcaggacgatctgggccgcgtagaaacgggcatggggctcactgatggggacaaatggggaggtgaacgtcagtggtcatgccccaaaatggtccagcaggtggccctgcagagcctaccccagaggaagacacctccagtccagccgtcagaaacgcaaggcacctgattcttagatagcccgacatgggaaacagcctgtgggtccatccacaggaaaatggaatcacagactgagctatagtcatacaatggaattccactcaccaccaccaccgccaacaggacagcccatgcatccactcaacaatgtggctgcatttcaaactgattatgttaagcaaaagaagacacaaaagaacatgaatgattccatttatatcatgtccacgcccagacaaaacaaaggcacggtgtttgaagtcagaaaggacaactgcctttggtggggaggtgacgtgtcaagagagggattcggcccggtgcggtggctcacccctgtaatcccagcattttggggggtcgaggtgggaagatcgcttgagcccaggagttcgagaccagcctgggcaatataggcaagacctcacctctgtatgtatgtagatatgtgtgtgtgtgtgtatatatatatatatatttttttttgattaatttattttttttaagacagtctcgctctcttgcccaggctggagtgcaatggcataatctcggctcactgcaacctttgcctcctggaaacaagtgattctcttgcctcagcctcctgagtagctgggattacaggtgtgcaccaccacgcccggctaatttttatatttttagtagagacggggtttcaccatgttggtcaggctggtctcgaactcctgaccttgtgattcgcccgcctcggcctcccaaagtgctgggattacaggcgtgagccatggcacccggcctccacctctgtatgttattggaaaaaaaaaaaaaaaaaaaagggattcaagggaattttcttaggtgatagaaaagttccatatactgttttgggtggaggttaggtagctatatacaactgtcaaaacttgtagcatggaacattgaagaactgtgcattttgttgtatgtaaagtgaatctatagttatctatctaaaatacaactacaaggccagcgcggtggcccatgcctgtaatcccagcatcttgagaggccaaggcggggggggcggatcacctgaggtcaggagttcgagaccagcctggccaacatggtgaaaccccatctctactaaaaatacaaaaattagccaggcaagggggcatgcacctgtagtcccagctacttgggaggctgagacaagagaatcacttgaacccgggaggcagagtttgcatggagccgagatcgtgccactgcactccagcctgggtgacaagagtgaaactctgtctcaaaaaataaaatcaaataaaactacgtatgtaaacttataagttaataagacaaatttataagttaaaaattttttttttctttcagcagggtctgactgggttacaacccagtctggactgcagcagcgtgatcacggcttatgcagtctttttttttttttgcatatgttgaaccagccttgcatcctagggatgaaggtgggctcatgcagtcttgacctcccagactcaggtgatcttcccacctcagcctccccaggagctgggactacaggaatgtgccaccacacctgactttttttttttttttttgtatttttttgtagagatggggtcttgctatgtaaggctggtctcaaattcctgggctctagcaatctgcccaccttggcctccccaagtgggattatagggcatgagccacagtacccagcctgtatcttaaacttacaaatttctgtatatagatttattttatgtataaaaatatatattaaaatctacacatataaaactgtccacctatataaaataaaataatagtataatttttattttatttttttgagacggagtctcgctctgtcacccaggctggaagtgcagtggcgcgatctcggctcactgcaaactccgcctcccgggttcacgccattctgcctcagcctcccgagtagctgggactataggcgcccgccatcacacccggctaatttttttgtatttttttagtagagacggggtttcaccatgttaaccaggatggtcttgatctcctgacctcgtgatccgcccgcctcggcctcccaaagttctaggattacaggcacgagccactgcgcccagccaattttttttttttaaaagagacaaaacctcactatgcagcccaggctggtctcaaattcttgagctcaaatgatcttctcacctcagcctcaggactagtgggactacagatgcatgccaccttttggggctcaaaaaatgcacaaaatcaacaacttcaatttttttttttgagacggcatgtcactctctcacccaggctggagtacagtggtgtgatcttggctcactgcaacctctgtctcctgggttcaagtgattctcctgcctcagcctcccaagtagctgggattacaggtgcccaccaccatgcccagctcagttttgtatttttagtggagacagggttttgccatgttggccaggctggtctcaaactcctgacctcaggtgatctgcccaccttggcctcccaaagtgctgggattactggtgagaaccaccgtgcctggcagcaacttcagtttggacacctaagttgccctgtttgctctgttttgttttgtggtggttgaaatatcacatattcctcagcagaggggaaacagaaacccacagggtctgggagaccacctgcatgttgaagtatgctggactcctctgcattcccagggggcttggtcgtgcactgccacctgtggacaccctgacagcctgatgtgatggggggtggcccgcttacctgaaccttccgatccgccgtaggtgtgagaacatctccccgccgggcacgtactccatgaccatgtataagtttgagttgtcctgtgggaagcagtggctggtcaagggcccacccctgagacttggacccgatctgaaggccttgggggcctccccggctggtgttcaaacattaaatgacaacagcgatcctggctccctgtaggaatcatgttctacaggggcgacccttatcctgctgttaatgggtgaaagtgagggctggctcagaggtatgtcaggacctggttagcctgccttggctggagagagaactctgtagtaccttgctctgggagcttgagtaaggctctgaggccacagttttgtcatctgtaaaatgggatcatgataggctgcagaattagtggggcccagaataaaaaagatggcccctggttaaaaaattattacagagggtcgggtgtggtggctcatgcctgtataatcccagtactttgggaggccaaggtgggtggatcacttgagcctaggagtttgagaccagcctgggcaacatagtgagaccccgtctctgcaaaaatacaaaaattagctgggcatcatggcgtgcacctgtagtctcatactcaggagactgaggtgggaggattgcttgagcctgggaggcaaaggttgtgagctgtaattgcgccactgcactccagcctgggcaacagggtaagaccttatcttaaacaaaacaaaacaaaatggccgggcacggctcacacctgcaatcccagcactttgggaggtcgaggcaggcagatcacctgaggtcaggagttcaagaccagcctgaccaacatggggaaaccctgtctctactaaaaaatacaaaattagccagatgtgatggcacatgcctgtaatcccagctactcgggaggctgaggcagaagaattgcttgaacccaggagtcagaggttgtggtgagctgagatcgcatcattgcactccagcctgggcaacaacagccaaactctgtctcaataaaaaaaataaaaattaggcttggcacagtggctcatgcctgtaatcccagcactttgggaggccaaggcaggcagatcacttgaggtcaggagttcaagaccagcctgagcaacatggcaaaatcctgtctctactaaaaatacaaacataagctgggcatggtggtgggcacctgtaatccccgctactcaggaggctgaggcaggagaattgcttgaacccaggaggcagaggttgtagtgagccaagattgcgccactgctctccagcctgagcaacagagtgagactctgtctcaacaaaaaaaaattattacggatctcaagacagcagcagcagcaaagcgttaaaccaggtgtggggtccctcggagaacaggcccttgtgcttctctgggtcaaacgtccatgaagctggccctgagtggcctttcctgtttctcatgaccacagctttggatggcacccaaaacggctcccaaagggcgctcaagacgtgcctggaactgtcatgacaaccccaccaggctggaactggtatgatccccattttaccatgagaaagctgaggcttggggagataagtctcttgcccggggccacacatcaagaagtactgaactgggaaatgaaccccggctgcctggggcagagtttgtgctcctgggtcaggctcttaccataaaccaggtgctgcttttgagggatgttactgaggttgggtgactcaccaagggtatcgaactacaaactggctggaccaggaactgaacttgggtctaccagagtcccagcctgactcctgtcccctgatctccctcctccagggatcttgttcttccacaaaagagagcagccactgattgtcctcagctccgaccccagccctgggggccagaaggctgggacccaatgcagtgaccccccgcccttggccactgggaccccaccttgaaggagaactcgagtttgacgaggaacggaaagttgacagcttgcaggatgcgcttttcattcagggtgtgttcgatctgtttcagtttcaccacctgggaagggaaggaggggagggcagaaaggagggggaggtgagaggggcctcatttcccctaatgcctggaactagggatgccggagccaggccggttccttcagccagaatcatttgtgtgcctgtggcctgtcgggcccttagctgatgctgaggacacagcatcagggaggctaggggctgcttgtccttgcacggcactaagtccagggcaaagaatacatgggttacccccacagaggtcagagccgtggtggagggtatcttggggttgtggagaagcagcccccaagaagcccatgtaaagtacctggcgtggtctggggaagggggaatcagacagcgctttctggaggaaggggcagctgaactgaaattgaaaagacaggcaggagaagcccaagaggtggggggtttaggacctgccttacccttgtctagaacactccacacagcaacctgaacctcaggctaacagctcctcagccatcagctgtcccctaatagcagatgccatgagcaggcacctggcacccagtctctcactgaatcaggatagaagccctagaggcccatgctgggagtacgccagtttggaagaccagacacagaggggaggtgacttgtccaaggtcacacagctggctgatgtcaggctggtgtgtaacatgtggccagcctggtccctcagtcagctgtcaactgctttgctcacatagctgtgtcctcagagtctatacctgccctacccagttcagtccccattagccacagggggatgctgggcccttgaaatatggctggtcggatggggagccaaattcaaaaattttaagtatctaaaatataaattaaaaaactgacaccagctgggcatggtggctcacgcccgtaatcccagcactttgggaggcccaggcaggtaaatcgcttgagcccaggagtttgagactagcctgggcaatgtagcgagaccccatctctacaaacaacaacaaggacaacaaaagcaattagctgggcatggcacgactatggtcccagcagctccagaggctgaggtgggaggatcatttgagcccaactgcacttcagcctgggcaacagagcaagaccctgtctcaaaaacaaaacaaccaggccgggtacggtggctcacgcctgtaatcccagcactttgagaggccgaggcaggtggatcacgaggtcaggagatcgagaccatcctggctaacatggtgaaaccccgtctctactaaaaacacaaaaaattagccgggtgtggtggcgggcgcctgtagtccctgctactcgggaggctgaggcaggagaatggcatgaacccgggaggtggagctggcagtgagctgagatcacaccactgcagtccagcctgggtggcagagcgagactccgtctcaaaaaaaaaaaaaaaaaaacaacaaccagccaggccaaaatggtgaaaccctgtctctactaaaaatatttaaaaactggccaggtgtggtggctcacgcctgtaatcccagcactttgggaggccgaggccggtggattacaaggtcaggagatggagaccatcctggctaacacggtgaaaccccatctctactaaaaatacaaaaaattagccaggcgtggtggtgggcgcctgtagtcccagctactcaggaggctgaggcagaagaatggcgtgaacccgggaggcagaggttgcagtgagccaagatcgtgccactgcactccagcctgagcgacagagcgagactccatctcaaaaaaaaaaaaaaaaaaaattaaaaaattagctgggcgtggtagccggcgcctgtaattccagctactcaggaggctggagcacaagaatcgcttgaaacccggaggcagaggttgtagtgagctgagatcatgccattgcactccagcctgggcaacaagagcgaaactccatctcaaaaacaaaacaaaacaaaacaaaacaaaaattaaactcttgatgcaggtactggtgactttcaggcatggttggaacaacttgggcatgtgaatctgctttttcaacttccctgctttttcttatctttccaggaaaaatttaccatcagagttgagaactgttgtaagcatacaatagacactggattttaaagatacttcagtacagaaaaaaaggaaatatttccgaagtcatggaggactgggaaaaaaacaaaaggaatgtaaaatgtttcattaatgatattttcacattgataatatatggaaagggtaatactgtagatatactggcttaattaaaacatatcattaggccaggtgtggtggctcacatctgtaatcccagcactttggaaggctgaggcgggcggattacctgaggtcaggagttcgagaccaacctgaccaacatggtgaaaccccaagtctactaaaaatacaaaagttagctgggcgtggtggtggcacccataatcccagctacttgggaagctgaggcaggagaatcacttgaacctgggaggtggaggttgcagtgagctgagatcacgccactgcagtccagcctgggcgacaagagtgagactctgtctcaaaaaaaaaaaaacataaaaaaaagccccaaacatgtcattaaaatgaatttcatgaatgacacctgtttctttcattttctcttttaattacaaactttgggtgtttttttagagatggggtctggctgtgttgtcgaggctggagttgaactcctgggttcaagtgatcctcccacctcagcctgtctagtagctgggactacaggcgtgcgccaccgtgcttggctgtttttactgtttatgatggagcaaacagaaaatttaaaattgcttctgtggctcaggttacatttctgctagttacattgctgctttatagcagtgcctggtataaagtccgatcacaaaaatatttacgggaagaaagtgcacataaacaccacttcccccaagagtgctcttgttctcctcctgttgggctggtgtctgaccctgtgtcacagtgcctggctttgaatccatggccggcctggagagggagctttgggaaggcggcacagggcccttctgacccctggggctggcacattatgggggctcggggaatagtgggtgagcctggcatggtggctcatgcctgtaatccctgtgctttgggaggctgaagtaggagatcacttgaggccaggagttcaagaccagcctgggcaacacagcaagaccccctgtctaaaacaaaaaacaaacaaacaacaaaaaaaaattagccaggcatggtagtgtgcgcttgtagtcccagctactcaggaggatctcttgagctcaggagtttgaggctacagtgagctatgatcacgtcactgcactttcctgcttgggcaacagagcaggatcctgtcccccacaaaaaaaccaagcggccaggcgcggtggctcacgcctgtaatcccagcactttgggaggctgaggcaggtgtatcacctgaggtcaggaattcgaaaccatcctggccaacatggcgaaaacccatctctactaaaaatacaaaaattagctgggtgtggtggcaggcgcctgtaatcccagctactcgggaggctgaggcaggagaatcgcttgaactagggaggtggaggttgcagtgagccgagatcacgccactgtactccagcctgagcgacagagcgagactctgaatcaaaaaaaagcaagtgagtgaacgggtggatagggcactctaaggagtgggcacagtccaggcaaaggcctgacaggcaggccctgagcgaggacaggccacctcaccttctgtttgtcgaggatcttcatggcatagtggttcccggtctccttgtgtttcaccagcatcacccgcccgaaggagcccgtgccgagggtcttgattcgttcaaactgatccaagtgggctgtgttctgtgggcagaggggtcggtaggctcagggcacgccctccccgcggcctgcttggctaaggtctggggcatcccctctgccaccggcagagggggccccggggagcacgtggggtcagcggggtgaggacagggggcggaaaatcaagatggcagagggcacattccttaaggcgggtggcaggggccagatccggccctggcctggggcctggaagctgctggcagctgtgctgggggcaggggcgggccgttgggaggggtggtgggatgggggtgcctggcattgggcagtcaggtgtctccacacaggagcccccatgggcacctagggagcaaatggggagggtctgaagccttctatggggtttctgaaattctagctgtgttgctgggacacagccaggggctgggggttagcagctcacccctccctgggctctgcacccggcagccttacctgagcgggactttcccattttttaagaaaatcttctttggctttggctaagaattctttcactgaaagggagagaggggagagttatacagagacgcccgtctcaccggggtgggttcaggtgatttctggggagatacttggtggaaagtggggtgcagttccaacccagagcctgacctttttctggtgcctctggggccttggctgggccgtggcctgggcctcccttgctacagagaggtgggatccagctgccactccatccaaagtggggtacagagagtctcaggggtcactcgcaggggaacggagggaggtgcccaggcagaccagcccacccccactcgccccagttctgaccgacattccatggccagggccgacgccagccgaggtatttatagccttgggatttggctgttcctctggccccttctctggggaggccgggcctgggatggaggcctcgggggctcgggtagcaggtgcccttggggggctcagctgtcaccttggcccccagctggccctgttcctctccgtggcaatcgcaagggcattgctccagagctggttcaagggaagtctcgcccgatgcccactcctcggccccatggtatcccaaggtgaacatcaccgcctggctaatgttgaaacttccccggcagaccctgtgccggctgctgtctacactgtctcatctgactcactcggcaacctgccttgtatccattgtctccacttaacaacccaggaaacaggcttgaaaacagtcattctcgtctctgctgagacacagcccagcaaagtggctaagggccaggacttggggtcaagatccagttcagagcccagcctggtctctgatgaactctgtgactttgggtaactgatctcacctctctaggcctcagttttcctcatctgtaaagtggggtggttttgaggaatgaatgagttcatcttgacaaagggagttgaacagtggccccgtgtgatgatagtgccagataaatgtcagctattattattttttatttatctatctattgactgattgattgattgattgattgagacggagtctccctctgtcgcccaggctggaatgcagtggcgcaatctccgctcactgcaagctccgcctcccgtgctcacgccattctcctgcctcagcctcctgagtagctgggactacagacgcctgccaccacgcccagagaattttttgtattttttttagtggagacggggtttcaccgtgttagccaggatggtctcgatctcctgacctcgtgatccacccgcctcggcctcccaaagtgctgggattacaggcgtgagccaccatgcccggccaatttattttttttaattattattatttttttttttgagatggagtcccactttgttgcccaggctggagtgcagtggcacaatctcagctcactgcaacctccgcctcccaggttcagatgattctcctgcctcagcctcctgagtagctgggattacagacacctgccaccacgcccagctaattttggtatgtttagtagagacagggttttgccatgttggctaggctggtctcgaactcctgacctcaggtgatctgcccaccttggcctcccaaagtgctgggattacaggcatgagccaccgtgcccagcctattattttctaaattgaggtataaaatatggggagagaggctgggtgaggtggctgacgtctgtaatcccagcactctgggaggccaaggtgggtggatcacaaggtcaggagttcgagaccagcctggccaacatggcgaaaccccatctctactaaaaataaaaaaatgaggccaggcacggtgggtcacacctataatcccagcactttgggaggccaaggcgggtagatcacttgaggtcaggagttcaagaccagcgtggtcaacatggtaaaaccccgtttctactaaaagtacaaaaaaatcagccgggcatggtggcaggagaatcgcttcgacccgggaggcagaagttgcagtgagctgagatcatgccattgcactccagcctaggcgacggggcgagactctgtctccaaaacaaaacaaaaaaattagccaggcgtggtggtgatgtgtgcctgtaatcctagctacctgggaggctgaggcaggagaattgcttgaatccgggagactgaggttgcagtgagccgagattgcaccactgcactccagcctgggtgacagagcaagactcgtctaagaaaaaaaaaagaaaaaagaaaagaaaatatggggagcgatcgggcatggtggctcacgtctataatcccagcactttgggaggccgaggcaggcagatcacttgaggtcaggagtttgaaaccagcctggccaacatggtgaaaccccgtctctactaaaaatacaaaaattagctgggcacggtggcgcatgcctgtaatcccagctatttgggaggctggggcaggaaaatctcttgaacttgggaggcagaggttacagtgagctgagatcatgccactgcactccagcctaggcgacagagtgagactctgtctcaaaaaaaaaaaaaaaaaaaaaaaaaaaaatatatatatatatatatatatatatatatatatacacacacacacacacacacatagggagagccgggaacggtggctcatgcctgtaatcccagtgctttagaaggccgaggttggaggatcgcttgaggcctggaattagagaccagccttggcaacatagcaagacccaatctctacaaaaaataaaacaattaaaaaattagctgagcatagtggcccatgcccgcagtttcagctaagcaggaggctgaggcaggaagattgcttaaagcccaggagattgaggttgcagtgagctatgatcacaccactacactccagcctgagcaagagtgagactctttctcaaaaaaataataatactctgggaggccgagttggggggattgcttgaatacaggaattcgagaccagcctggacaacatcaaaaccctctacaaaaaataaaaacattagccaggtgtggtggtatgcacctgtagtcccagctactcaggaggcagaggtgggaggattgttcaagcccgggacatagagcctgcagtgagccgtgactgagccattacactgcaggctgggtgacagagtgaggccctgtctcaaaaaaaaaagtaataataaaaaaaccccaaaaacaaatataggagatacactgagtgctcaaatcttaaatgcgcagcctgacagattcttgcattatggacttgtccttttaaccaccacctagggctacaagggaccagccccttgctgagtattttctatgcttcgttctcaccctgtggggtgggagctgctgttattcccactgtacagaggagaagactgatcaggtctgaggtcacttgcctgcccccacatcccatgagattaactacttcactgccaactcagccattggtttcagtgctgagtccagtgcaccagggtggccaatgtggacagagctgccttcaaccccctgatgttcctgggtttgctgccaccgaggggccctgtacacttgccctttggcattgctggttatctgcctgccagtaatcccacatggccttgtggggagccacccccactacctgtctccagagctttccctcagcattcagagagaagagccctcatggagctagaaagtggtagatggtggctgggtgcagtggctcacgcctgtaatcccagcactttgggaggctgagacaggcagatcacctgaggttgggagtttgagaccagcctgaccaacatggagaaaccctgtctctactaaaaatacaaaattagctgggcgtggtggcacatgcctgtaatcccagctactcaggaggctgaggcaggagaattgcttgaacccgggaggcagaggttgcagtgggctcagatcgcgccattgcactccagcctggacaacaagagtgaaactctgtctcaaaaaaaaaaaaaagaaagtggtagatggcagatggagagagaccgtggccaagaaggccccacaataaatgaccaggcggagaggggataggcaatgaatggccaggagtcctagatgggtgcctggctgggccaccaactagcccaggggcctgagcctgggggtcacaccaaatccaacactttcactagcagaacctttgtttgagtgttttattttgttttgagatggggtcttgctatgttgcccaggctggtctccaacttctggcctcaatggattcccccaccttagtctcccaaagtgctgggattacgggcatgagccactgtgcctggcttcagtcatagaacctttgtgacagaaaacatcttccttggaaacctccaaataatccacacagaattcagcagtgggtggggagggtggagggtgccctcttgggattctaccttcacccacacaagaaggcagagaggtgccaggcttgaagggaatccaaaaggtctggtccgttttccctttgctcttagcaaaaaggaaagaattgctgaatcctgcacctccccgactcgctgagctcccagcccctggctgtccgctggtgccccacagagtcgctccacagggtgccttgctgttagcatggcccttctctggcctctcaaaggaccagagcgcccaggctctgtcccctctggtgccactagccctgttagcttgtcagatttggggatggggcatgggggaggccagtgccaggaggagcaggcagagagagggatgatgggggggaggggcaggtaacctcaatcaagaggccccacactcacctctgcttcctgtctcttccaggaaagggtagaataaagggtgggtgggatggggtgatctggcggccttctgccccctggccagggaggctcagggtgctggctgtggcttaggcccccggaaggtgcggtgcaggtagcccaggaaacgtacagccaggtgggcccagaggagcagctgcagccacagctggaaggtggtctccaagtccccaccctggctgctgcctgatcccagatccatccccagcccccttgggctctccctggaatcttccttttgctgagaaaccaggaaaacgcagagcctctaagtcagcttccttgggatggcctcaggggaccagggaggaggagctggttgccacagaagcttttaaaggtacctgctccaagctagccaaggtttgcagagggctcccttggcaggaggcaatgggaagattctcccgagggtgtccctctggctggcctgcgtgccccagggcggggcgataaaactaacttccctttccacggacttcactgctcccaggacgccaggccctgccttcctcagtgggcactggactgtgcagaggacagcgcctgatgtgcccagagcagtgcccactgggcagaggggaaagagttaaggttcaggatcaggcaacagccagagactccttaggggctaaagaggccccagagctcccttaattcgctgaaagaacagctggagagaaaggcttggggcggggggcgacaagagccaccctgcctcctcccctgaactccctttcaatgtggaacccccaaatcctgctatcctgagagagaaaatgggtatatctgactcttttgttttgctcctatgcgggggtggagaggggaaaggcatcccgggatgtccttggcctctctcaaaccttgccctgtgcttggctctactctcggccatgaaagtccaaaccggaaacgagcggctaaacccaggggtgggggagggggaggcagccttgaccatcttcctccttctttccagatcccaaaagaagcagagggtcagtggcagcctctttgagtgtgcccggcatccaggacccctgctagcaacaggaagtggcagaggatggtaacccagccagctgctggcctgtacagcctgccgccctgcccacatctcccacacggggggtgccagctctcactctggtccagattccatttgggttcatagggaaaactccttgacaccccttgaaaagccaggaccacagcagaaagcagaaatctagaaactcgccctgggaatggggaattgcaacagcagaatatcaatttgggcaaggggcttggggtctctctcggaaggagcccagccacagaacccccttcctccggacaacaatctcagaccttctgcccttttgaaatctggctgtcctgggaattctggggcaggaatgcccagcctgggctgggccccctactcgaggctggctgattcctccagtggagcctggattccctgctctgggcttacctaaatgacacaactctgagctggaccccaacactggctggaacgacccccattctgagctggaccccaacactgggatggctcatcctacagtctgagctgaaccccaacactgggatggaccactccaccacccctctctgagctggccccctgccgggtggaccatcctcccttgtctgaactgggccaccgatcccctctctcttccccaggccgcacagcccggggctgtacaggaggcgtttccagggccagccaggggttcacatccttcttctcttcgcctgtgccccagaccccgctgcagcccctccctgacttaaggggcagagtgtgcctaggaagttgctatagtaacaggactcagcctcaccatcgctggagttggaagccatcactcagtcctgttctcagggcaccggcactacggtggctgggaaggctcatgagacctgccgtgtctgttcggctgtctgtccccagaaccctgcctgcagggggagctagggagccgtggggtgggagcaggaagagaaacccaacccagaggccactgggtgtggaggagggacagatagggccctccgagtttctgtagacgcggttgcgctaaggggagagctgccttgataagacctcttgggcacccatacaactgccaaggcacagaaggtgtttggccgtcttaggcatccataggatgttacacggcactagttcttcccatctagggtcttcttggggggtgcttttctctctttgccaggatctgcttgtgtcctggggatcgggggctcccttttactagctctgccccttcccctgtgggccagctcccaggggtatcttcagccagtgccagccacgacctgagccccacttggctgtctgacctgggcgcctgccccctggggccgctgctccctctccattcttccaacttggccagagcctgggccttagtcttttttcttggccctctcagctctcccaatggctttgccatctttgggtgtagattcccccaactccactccagggttcattctggatccctggcctcttgggaggaggcggactctgtcctgccctggcacagagatggtaccacaggggactgcaggatgcttaactggtgcctcccaaggcctgggcattttcctgaccccagtcgggccggcgtctggcagatgaaatccaggtgccccctgcaggctggcctggctactgcccctgcccctgccccacccttctaagagggcaaattttgtctaactccatcctctcagaatcagagcgcctcaaagcaaagagggacttccttcctcatcttatttccttctctgggagcctctgggaggaagtacagcttcgggcgtttctcaacgtgtgacatagtcccattggcagaacatgacatgattttcgggatgtttcatttatctagttacactgtatttaatgcgtatcagagaaaatataactggcatggcaatcccatgatttcatttatattattgtttagaatgagctccaagtttacatctgaacacaagtgagtaaaacttttattattttaaattaagaaaatatgatagagtaaaaatctgggaggctgctgaaaaatgtcaaagtcggggaattctggggtccaagaagtttgctggtagatggatctggatgtgaatcctgcctctgtgacatcatctatgtcatggatgtcatttctaccagagggctcctttggaaaatttggataacagcccgttatgaaagtcaccagagtaggtatctctatccgcctggccatttagcctgtggcacagcctagatgcccaataaatagtagctctattttaccatgatcattcattcctgggtgtctgacctgtgctctgagagaatcagtggttccttccagagcctctgatctttttcttgggatcctttttcttgtgtggctttccaccccccaccacatgtgtctgatagccttgaaggttttccaggactgtcatctccccaactttcaactgagctaccgcaatatatagctgcctgcctctaccttccacctcccagctggcctcacctgctgggggcctgactcctccccccccggccaagtcccctccaagctcatgcccagaccttttttggacactacccacctgctcctctgtcatcaggcactcagctacaggcatttccctccccagcccccacccattggtgacatgtcaggcctcttcatgatcgctctgtgactctgagttctgctatttgaatccgtatgggaataaagttccctggctttcatacctttctgggagggggcattcaggaaactcagatgctggggtttgagaccaaaaactggccttccttttcgaccaatagttccgactatttctgggtaagtggacaggggatcccagctgccttccagctttcagactggagtgacaacaatttaagagctgtaaaaattgggaatggggttcaagaccatttctgatggtatttccagatagagaatctctttctctggctggctggaaaagaccaacctaatgtgtgggcaagtgggtgaaacaggtctctctctggctgagccctgggaatgatcagaatcactagacgtcaaagcaaatcactagacgtcacccattactctctttgactgcctcctcctccccagtgctctttctgaccatctcagttagaaccgaatgaacctcgctaaacccagacacttttcatcccaagccaggagtggtggaagaagccccagggactgggtgaatgacggagcctcagttgtgaaacgaccatttattgaggggccctccatggagcctagagctcactgcaagacaggaaatgagagggggctctgccaccacccccttaccccaacgcaggaaagaggatgcaatgaatcccaacaagaccagctcaaacttggctttggaagcactgaagcaattctctacgttcataaacagtctgctaccccagccagggacagacgcttgcttggaggacggagcacaagcagagcagcagaatgacagagtgacaggatgagagaggcagagggacccagaaagatcctgtcccccatgccaagtgacacagaagaaaaaaataatgctggaggtggctctgggaaatgttcagggggcaggatgggtttggaagggggggctgtgctaaggtgaagagggaaagggcaggagaaagatggcgggggctggaggggggaggggtgtggtcagcaagtggccaaggtccctgcgcggtggaggcagacagacctcatcgcattcccaaactggtagaaacctgggtcggggtcaggcagaggatcccataggtgagagaggtgagtgaggaagtggggggattagaatctgggaagaggggccaggaaaggagggggtaggctggtgacaggggcccatgtggggccccagcggtcatacgtgccatggttggcagtgacagctgggggggagcacggtctttgcagcatggggcggccctaggggaaggggacccctacagggggtactctgcgggcccgcgggccccagccttggacaggccggggcaaggggcgctggggggtaggcagagaggatgaggggccccgtagggggaggggccaggcgatgatggacaaggccagggctggcagcgcagggccaagatcggggtcacagcccgggcactcaccgctctcctgctcgctgcccttcttggcggcggcggcgttgcccatcgcggcggcggcggccggggccggtcccggagctgcggcgcggcgggtgctggctgcggccggcggccccggagcgcgctgggcggcggcggcggcggccctcgggctggctgcgctagctgcggcgccgcgacccccgcccagcccctgcttcccgcgtctctccgcgcccgcccgcccgggaacctcagcccaagatctctgccgctgtctgtgacgcccccgcagcccgccgctcattggcctaggccgccctgactgacggctcagcgccgcctcccattggccctcccgcgaccttcccgcgccactataggctctcagcctcgggacacgcaccgcggactctcggccattcactcgctcgcgaggccgcagctgggcgggcagacgcgtccgattggccgagacgctggactgggcccggggtccgccctgcgaggccgccgattggcggaggtgccgggtccgccaagccccccagcagaacgctcagtgtcaatccgggggtgagagggcggggcggagacgcagtctgcgggcccgggccggcggggcggggcggcggaggctggctggcggccgcgcagcgctccgaggctcaggaggcggccccggcgggcgcccggccggccccgcgcgcgccgcagtcccccgcccccgctcagtgcggcagcggctgtcggccagccggagttggcgccgcggcctgcccggcgcagccgctgtccacctgccagcgggggaggggcgcggccggcgcgcgggtcagaggtcgcccggccgccgccggcgtcattcataaggcctggcgctgggcggccgaggccaggcctgcttgggggccaggccgcggggcctcctgggttttcccagccgcactcaggaggatgccgggcccggcgcaaggggtggctgggaaggggcgctcagtgtccacccctttgctgggccctagccctgggctcctgccagtagtaagagctggcacccacttaacgctccttcgcaccacactcccatcgcgtaggtgctaccatcatcactcccattgcacagatgaggaatctggggtacagccaggcagattccctgctcctgttccccgtctgtatttcctgtctgggcaatgcgaagggaacctgccccttccttcaggatcctctttcagtacacacttagcagaggacagtcggggtttcccaactgcgacactactgacggtgaggctggatcattttctgctggggggtgtcttgtgcaccactgggtgttgagcaacatcccccgcctctacccactggatgccagtagcccctcctctatcttcctgctggctgtggcaaccgctgtctcctgacattggtgaatgtgctcttgcggggccgaactgctcctgattgagaagcacttaagagagggtcaggggaggggagaagccaggtcaccccgactcggaagggctagctgggcttaactacaagccgatctgctgcttcgacttgaatagcctccaccttctccagctgctgtctgcccccatgttcccagatcaaccacagttccagggagggagagtcagagcctttctgtgaactatggggaaatggctgaccactccgcctctggatggatagatacatggtaaggtttagtaaaatttaataaaagcattgctgtttgtgtgttgggatcacgatgttaatttcctgtgggtcaagggcaaagtctgaaaaatcactcattataatctatctgcaggacagctggtttaagttttgacaaagaaaaacccctcctggaacctcagtctggaatacaactgtagaaccaattaagactggagtaggaagctggaaagaagacgtgggacagccaacccactggacagggcaagaggccacttctgggggagagtggacaaagttgcttcagtccaccagagacaaaagcacaaacaatcattctaaatgaagtgcttttaattttcagaccaaacatttttaatataaaaacattttgataatatacaaacagcaatcacaacagcatccacatggcagcaaggggaccagggcacagagagggggagcgggctggggagggacagttttcagggtcccagttgcttccctggcttgaaatcaccctggtcctagcagaggacaggttaaggctgccagaggcagagggtccctgaccctggcccggagacagactgcccaggcaggccctctgataccatcttccaaccatggcagcctccaggaaaagccagatccatttaggagataacaggaaggtggctgtgattgacaggaaaggcaacatggttcctcagcatcctgctgatcacacctctgggaggggctgctggattgaagaggacctaagaatcttcctgggagcaggacagaaatgggatctaagtctacctactaactaacattcccgcctgtgacaccagaaagctggagtgggtctgctcagatgtacaggaagagaaaggaatgacaaagcctttggctcagcaggactggagccttgacaggcactgaccaagaaagcctctaggtgggccagggaggtctgtgggaaagctttggatcaatggtactcaagggtgcacagtggcacagtggccttagttagaatttatgaagacgaaaagaacacaagtcagaatttagaactgaagtacctgcttcttataggcctgtagaggaaaagcgagatcatccttctggccaggactaggggagacccaaggcctgttctttcctaggggctgagtttgacagacctggattgcagctgatggcccccaaagtcctctagatgggccctgcaggactcgctgggaggcctggttgcccctcccggcgtgctgggacactctgggttcctgcagttagatgcagtccatggagttctcagggaggaggccagggatgcagccagggagccccaagcccttgataggagtgcagttgagtgggaggccgcagcccagggaggggtcctgggtctctatggcctccagcctgtccatgttgttgtcccagttgatatggaagcgggtcacccgggggttcgaggccaagatgttccgctggagctggggcaggaagaggaacgtcaacccttgtaggtacgccctctccttggtcccatagagccaggacacccccaatcacccatctcaagcccagcaagagcaacctacatatggaactccagaaaacacctgtggccaggaccttatttatttatttatttatttattttttgagacggagttttgcttttgttgcccaggctggagtgcaatgctgtgatctcgtctcactgcaacctctgccttccgggttcaagcgattctcttgcctcagcctcctgtgtagctgggactacaggtgcaaggcaccatacctggctcattttcgtatttttagtagagacgggctttcaccatgttggccaggctggtctcaaactcctgacctcaggtgatcctacagcctcggcctcccaaagtgctgggattacaacgcgtgagccactgtgcctggcccaggactttttttttttaagggacagtctcactctgttggtcaggctggaatgcagtggcacgatctgagctcactgcagcctcaaactcctgggctcaagcgatcctcccacctcagcctccagagtagagcacaccacccatgtctggctcatttttttttttttttttttttgcgggggttagggacagggtctcactatgttgcccaggctggcctaatcttaattctctaagacatgcctttgagagacaaaggtctttttctcctcttctaacacagtactgtaagaactgaatattacttgaaaaccttaagaagtgaccttgactctcaatttgaatggctgaactccccccaagtataaagaacggccttgtgggaagcaggaagtggaaacaggccccacctgggagaaatctggcttcatgggcgggttctcacgcagctcagggttgaggtactcgttgttgacgtagtagcccactcggatgaactcctgtccatggtaggtgcaggtgatgaggaccacagtcacacccacggcatcagtctctgggatgagggatgggttgggggcgtcggcctaggggagacacatcctaggccttagcagtgccacagccatgcctcgatgtcattagtacaaagattcccaagcatcatgtatttactgagcaaaaagtatgctctctgccctcagttttcttttttttacttctgcctctcgggttcaaacaattctgcctcagcatcccaggcagctgggactacaggcacacaccaccacacccggctaacttttttttttttttggtatttttttttaatggagttttgctctgttgcccaggctgaagtgcaatggtgcgatctcggctcactgcaacctccgcctcacgggttcaagcgattctcctgcctcagcctcccgagtagctgggattacaggtgcccaccaccatgcccggctaatttttgtatttttagtagagatggggtttcgccatgttggccaggctggtctcgaactcctgacctcaggtgatccacccgtcttggactcctaaagtgttgggattacaggtgtgagccactgcgcccagccttttttttgtatttttagtacagacgggatttcaccatgttggccaggctggtcttaaactcctgacttcaggtgatctgcccacctcggcctcccaaagtgttgggattacaggtgtgagccattgcgcctggactttttttttttttacacagggtctggcctccctctgttacccaggctggagtgcaatggcgccatcatggctcactgcatccttgaactcctgggctcaagcaatcctcctgcttcagcctcccaaatagctgggacaacggtgtgtgccaacatgtctagccaattattttttgtagagacagggtttctccatgttgcccaggctggtctcaaactcctgggctcaagcgatcctctcacctcagcctcccaaagggctgggattacaggtgtgagtcactgtgcccagccaggagttgtcaactgatggaaacacagaatcaatcccacaaatgactacaaaacgttgactgtggcagggagaggtgcgtggtactctggaggagtgtggtgagccgggggacagtggcatgaagctgaacaggtgaggcaggtggtatcaggccacccgggggccagctaagggattgggaaagggcaagagagtaagcaggaggttaagtgccacatcactcttgtgatctgaaaagaagcctctggcaaagtgtggagccgtgacaggagactgtagtggagcagaaggcttacaccagtcatcctggagaggcagtggacttggcttagaccaggcagtaaagaacagattcagggtgtactactgcaaacaagaccagccacgtaattggtgcaaaataaaaccaatgcaaaatgaaaacaccacgcccctccagaaaagctattaggtttcagacggtgacagcagagtatcgcaccaagtgtggggtcctgtgcagctgcctgggttgcacacccaggaggccagtcctgactgttgagtagatagggcctgtcagtggatttagtagtggtggctgaaggggttagataggatgtggtagcttggattagggcggtaacagcagtgatggaggtaagggagtgtatccgagcagaggatcctgaaaaatcacctggagaactcagaatctccatttgttttttctttcttctttttttttttttttttttttgagatggagtctcactgtcacccaggctggagtgcagtggcgtgatctcggctcactgcaagctccgcctcccaggttcacgccattctcctgcctcagcctcctgagtagctgagactacaggtgcccgccaccaggcctggctaatttcttgtattttttagtagagatggggcttcaccatgttagccaagatggtctcaatctcctgaccttgtgatccgcccaccttggccttccaaagtgctgggattacaggcgtgagccactgcaccggccttctttttttaaagagatagcttttccctctgtcatccagactggagtgcagtggtgcaatcacagatcactgtaaactcctggaactcctgggctcaagcgagcctatttttttttttttttttttttagagacagggtctcactctgttgcccaggctcgagtgcagtggcgcaatctcagctcactgtaacttccgccccctggattcaaataattctcgtgcctcagcctcccgagtagctaggataacaaatgtgcaccaccacatccagctaatttttgtattttttagtagagacagggtttcaccatgttggccaggctagtctttaactcctgaccccaagtgatctgcctgccccagcctcccaaagtgttgagattacaggtgtgagccatggcacctggcctcaagtgagtcttctgcttcagcctccctagtagctggcactacaggcctgcatcactatgcctggttaatgttttttttgtagagacaggtctcgctgtcacccagaatgcagtgcagaggtgcaatcatagctcgctgtagcctcaaactctcaggctcaagcaagcctcctgcttcagcctcccaagtagctgggacgacaggtgcaagccaccacacccggctaatttttctattttttgtagagatgggggtctcgctatgtggcccaggctagtctggaactcctggccttaagcagtcctcccgcctctgcctcccaaagtgctggaagccaccacacccggccagaatctacatttgacaacccaggtggggtgctgcatgagagccatttaggagttacagtccatcctcattattcatgggttccatatgtgcaagttcacctacctgctaagtttatttgtaaccccaagatgaacacctgcttgctttcacagtcacttgcagacatgcacagagcagggaaaaactggagttacctaccatgcctgttcccacctagagttacctaccacgcctgttcccacctgaggtcaaacaaggcaacactctgtcttctggtctcagctctcactgtgaatgagcgtcctttcctcagcctacttagtgcttttttccatgttttgtgctttttgttggtgagtttgctgtctatgatggcacccaacggtagtgctgaagtgcagtgtaggatacaagaaaggctttatggaaaatatgcgtattagagaagtttcattcaggagagttatagtgctgttggctgtgaattcaacataaatgaaccactgtatatattaaataaggtatctttcctttttttctgagacagagtatcgctgtatcacccaggctagagtgcactggtgcgatctcagctcactgcaatctccatctcccaggttcaagcgattctcccgccgcagcctcccgagtagctgggattacaggcatgcgccaccacacctggctgatttttgtatttttagtagagacggggtttcatcacattggccaggctggtcttgaactcctgacctcaggcgatccacccacctcagcctcccaaagtgctgggattacaggtttgagccatcatagccgtcctggtgtcttttcaacataaacacacatacaagtttacgtattaaccagctgacgaaaatgtgacttccaagaatctaaccctgtatttcccctggggcaatggttcagtattcactaattcagtgttcgcggcaactttatagaacgtaactcttgtaaataatgggaattgcctgtaaatcagtggcagctttgacacagaggtgggggaagggagggcctgacggcctctgagaggtcagatagttcctgacagtagaactaggatttgaacctgaacttttaaattgttttaattgattgattgagactgggtcttactgttgcccaggctggagtgcagtggtgtggtcttggctcattgtagcttccatctcccaggctcaagtgatcctcccatttcagcctcccaagtatctgagactacaggcgcacaccaccatgctctgctgatttttacattttttgtagagatgcggtctcactatattgccccagctggtctcaaactcctggcctcaagcaatcctcccacctcggcctcccaaagtgctgggattacaggtgtgagcaactgtgcccggcctctatgtttttaatacttgtttttttcttttttagagacagggtctcactgtgttgcctaggctggagtgcagtggctcactgcagcctcagactcccgggctcaagcaatcctctcacctcagtccctggagtagctgggtctataggcgtgagcccgtgcccagctgaacttgaacttttgattcctgaagcactctgtgggatttcaggtaaaagaggatgtttctaggaatcaagggctaaggcctaaggcctcatctttcttacctgaaagacaaacatgtgtctccctgctggcacagggcccaccagcaccgagtctaggatctgatcaaattcctcactctcagccgagccaacataaatgatcttccactccaggtctgcaaagatataggagggttaactaattgaaatagctcaacagcaagaaggcagggataggctcttgtatttttttttttttttgagatggagtctcgttctgtcacacaggttagaatacagtgatgcgatctcagctcactgcaacttccgcctcccaggttccagtgattctcatacctcagcctcccgagtggctgggattataggtgcccgctgccacgcctagctaattttttttttcttttttgagatggagtttcactcttgtcacccaggttggagtacaatggtgtgatcttggctcactgcaatctctgcctcccaggttcaagcgattctcctgtctcagcctactgagtagctggaattacaggcacctgccatcatggctggctaatttttttatttttagtagagacagggtttcaccatgttgatcaggctggtttagaactcctgacctcaggtgatccacccgccttggcctcccaaagtgctgggatgacaggtgtgagccactgtacctggcctgtttttgtatttttagtagagatggggtttcaccatgttggccaagctggtatccaactcctgacttcaagtgatctgcccgcctcagccttccaaactggtgggattacaggtgtgagccactgcgcccggccacatcttctattttatttttatttacttattttttgagacagtctccctctgttgcctaggctggtgtgcagcgggatgttcatggctcactgtagcctcaacctcctgggctcaagcgatcctcctgcctcggactcccaccatgttgggatcacaggtgtgggctgctgtgcccagccttgtggtaattttagacagatccttaatatgttaaaagactattattccatctgtcagacacttagtgccaggcactgcagtcttgaatgctgaggtgggcacaaagctctacctccattagggaattctgtcttgtaagcctagctatgacaggtgaccttgactatacctctggggaaacctgggcctctcaaggcctgagcgtgaactgtatggcagaggctgaattaagagccacgtgacacagacgtgctgagaagggaacggcagggagttgggtcatttcagggccctgcccactgggtgctgggataggaagcagcatcctctttcacacacagggaccggtgccactcaacgaagtggatccctcgacaactggggcagggtggcagattccaatccggcaggagagccagcctgcaggagggggaaggtgaggttgctcagggagccagccaccctggtcttccagatctggcaccaagtcatgcctacttagagacatttgggcaactcagtcaacaaatgtggcatcccggggtgatcctccaaacactttttttttttgacagtttcactcttgttgtccaggctagagtgcaatggtgagatctcggctcactgcaacctctgcctcccgggttcaagtgattctcctgcctcagcctcctgagtagctgggattataggcgcccgccaccacagccggctaatgttttgtatttttagtagagatggggtttcaccatgttggccaggttggtctcgaactcctgacctcaggtcatccatccgcctccgcctcccaaagtgctgggattacaggtgtgagccaccgtgcccagcctcaaaccctaactcttgcaccccatccagcaggagggccccctcccctgaatatgctccattgagatgaaaggaaagtgcttatggaacctctggctgtcaatcacaggaaattccggtcaacatggcctcttgcaggaggtccaagtgtatcaggggcaaggtcatgctggtacagggaggcttggcaagaggcttgaaacttatttttggctctttagaaattacacaacccttcagctctagcagctgggggaagtttcacaagctgtgattttcacaggaagcaaactctctcagaagctgccctgttccttggtccagtgtcccacaagagcatccaactttggaagcatgctgctgccaggtcatgactacagaggcttgtcacctgagccccatgcccttctttgatgcactggctgcctgtccctttgtggtttcactcaggaaccctatagcaggtctgtaggatacgggtgaccattgaactcacaggtgtttggtcgaactagcctcttactatttgcagggaggaagttgacttttttcactggagatggggtctcggtccgtcacccaggctgcagtgcagtggcataatcatagctcactacagccacaaattcctgcgctcaagtgattctcttgccttagcctcccaagtagctgggaccacaggcttgtgccacacgcccagggaatttttaaattgtttttagagatgaggtcttgcttggttgcccagcctggtctcaagcaatcctcccgccttggcctcccaaagtgctggaatttgtctgagccatcatgtccagcctgttgatttatttttgttacaagtagtgacacaactggaatcaagttttgggggaagacagaaaagccagccagccctgctctctcctttctaaagcagttgtatcattttggtgtatatccttgagccctttcctctcatagccggtagaatcctgtacgggtgcatttaattcatgtcctgggaaggtagacaaaaaagactaaagtgtacccacgagcacctgatgttgtccagctgaggtcaatactaatcggcaaaacctaaacaaagagcatgtggaaactcaccgaaataaatgggcccctgcaacataggcagactcgactctattaaaaatcaacaaaattaattgggtgtggtggcgcgtgccggtggtcccagctatgcgggaggctaaggttggaggatcgcttgagcctaggagttcagggctgcagtgagccatgatcgagccactgcattccagcctggacgacagagaccctatctcaaaggaaaaaaaagaaaaagaaaaaatgtactgtgttgactgtcaggcacaggggctgaaatggctctttcaaccagggctggaaagaaactggagaattaactaacggctgtagagaaatactgactcaagagttacagaagctggttgggcacggcagctcacacctgtaatcctagcactttgggaggccgaggcaggcagattgcctgagctcacgagttcgagaccaacctgggcaacatggtgaaaccccatctctactaaaaatataaaaatttagctgggcatgatggtgtgcacctgtaattccagctactcaggagtctgaggcataagaactgcttgaacctgggaggcagcagagattgcagtgagccgagattttgccactgcactccagcctgggcaacagagccagcctccgtcaaaaaaaaaaaaaaaaaaaaaaaaaaaaaaaagaagaaagaaggaaagaaaggaagaaaaaaagagttataggtatagggccaggtgaggtggatcattggatcatggctgtaatcctagcactttgggaggctgaggcgggtggattgcttgagctcagaagttcgagatcagcctgggcaacatggtgatacaaaaaatacaaaaaattagccaggcgtggtggcatgcccctgtagtctcagctactcgggaggctgaggttgcagtgaactgagatcgtgcctctgcactccagcctgggtgacagagtgagactccatctctactaaaaatataaaaaattagctgggcgtggtggtgtgcacctgtaattctaatttattttattttattttgacatggagtctcactctgttgcccagactagagtgcagtggcacgatctcggctcactgcaagctccgcctcccgggttcatgccattcttgtgcctcagcctcctaatcagctgggactacaggcaccccccaccacgcccggctaatttttttttctatttttagtagagacggggtttcactgtgttagccaagatggtctcgatctcctgaccttgtgatccgcctgccttggcctcccaaagtgctgggattacaggcatgagccactatgcccagtcgagaatcatcttaaatttgctgaagtgcccaggcatggtgatgtgcacctgtggttccagctacttaggaagctgaggtgggaggactgcttaagcccaggagttcaagtccagtctgggcaacatagtgacaccctatctctttaaaaaaaaaaaaaaaaatctggctgcagtgttataagtagagacatacgtgtatgatttcatctctaaatataatctttctttagaattatacatgggacacaaatcaccaatacagcaggaactcatagctatgagtacaggacacagctgtacacatgacgtgtgtacctaaccttctgagcaatgtcaaggcaactcaactgtgtcccatgttatctctctgcgctaacttcacaagctagtccctgtgcaagacatacctccactgtgtgtttgtgtgtatatatatatatatatatatataaatgataagactaaagacatgtacacaattagtatagctgaactagctaaaaagtctgcttcctgcttttttgttgttgtttttttgagacagtcttgctctgtcgcccaggctggagtgcaatggcgcaatctgggctcactgcaatttccatctcccgggttcaagcgcttctcctgcctcagcctcccaaatagctgggactacaggcacctgccaccaagcctggctaacttttgtatttttagtagagacagggtttcaccacattggccaggctggtctcaaactcctgacctcagatgatccacctgccttggtctcccaaaatgctgggattacaggggtaagccactgtgcctggccattttttttttctttttttttttttgaaacagagtctcgctctgtcacccaggttggagtgcagtggcacaatctcagctcactgcaacctctgcctcccgggttctagcgattcttctgcctcagcctcctgagtagctgggattatagctgcgtgccaccatgcctggctaatttttgtatttagtagagccggggtttcaccacgtcggttaggctggtctcgaactcctgaccttgtgatccatccgcctcggcctcccaaagtgctgggattacaggtgtgagccaccacacctggctttttctttttttttttttttgagatggagtcttgctttgttgcccaggttggggtgcagtggtgcaatctcggctcgctgcaagctctgcctcctgggttcacgccattctcctgcctcagcctcccgagtagctgggactacaggcgcccgccaccacacccggctaattttttgtatttttagtagagacggggtttcaccatgttggccaggctggtctcgaacttctgacctcaggtaatctgcccgccttggtctcccaaagtgctgggattacaggcgtgagccaccatgccaggcctcctttgtttgtttgctttttgcctttgttcataatcaaagatgagctctgctgccataacaacttcgttatttctgggtcagaacatctggcttctatgacttattcaaccagtgtctgttgaatttctcagctaaatgtggaagaatctatttccagatgtggaagataaaagtgcaaagggggcttggggcccctgagaaataggggtcacccaactggggcttaggggttagggtggttttttttttttttttttttgagatgggggtcttgctctctcacccaggttggagtgcagtggtgcaatcatggctcactgcagccctgacctcctgggctcatgcaatcctcccacttcagcctcctgagtagctgggaccacagacacgtgccaccaagtcccgttaattttttgatgtttctgtagagacaaggttttgctatgttacccaggctggcccaaattcctgggctcaagagatcctccttccttagcctcccaaagtgctggaattacaggcatgagccacctcacacagctgggttgggggttttgtcagattttcagttgacgctgctgagagtgaggcagattctccctttttcatggagaggagtccagaaggaggcagaaagcaagctggcagatcagtcacagagagccctaggactggaagagccaggatttctcacttgagttactcaaaggaaaagctttatcatccaggtacaattaacaatagcattctctggccaggcgcttaggattcaaagtgtaatcccagcactttgggaggctgaagtgggcatatcacttgcgatcaggtttgagaccagcctggccaacatggtgaaacctcgtctctactaaagacacaaaaattagccgggcatggtggctcaagcttgtaatcccaactacttgggatactgaggccggagaatcgcttgaactcgagaggtggagattgcagtgagctgagattgcaccactgcactgtagcctgggtgacatagtgagattccatttctaataataatcatcatcatcatcataatcatacgacgggcacggtggctcacgcctgtaatcccaggccgaggcgggcggatcacaaggtcaggaaatcgagaccatcctgggtaacacagtgaaaccccgtctctactaaaaatccaaaaagttagctgggcatggtttcgggcgcctgtagtcccagctacttgggagattgaggcaggagaatggcgtgaacccgggaggcggagcttgcaatgagccatgatcacgccactgcactccagcctgggtgacacagcgagactccatctcaaaaataaataaataaataaataaataaataaataataataatagcacttcccttcactgcattttgagtgtcctgattaggcaataaattctgtggtcattcctatctatgctccacccctgaaacagggaatccttcctttctttccctggattggagcaaagataaagaatttagattcaaaacttcagtgccaatacttctacaaactggctgtgtgactctggtgaagtcactccatttctattaaaaaatgatcagcagaggctggacgcagtggctcacgcctgtaatcccagcactttgggaggctgaggcgggcggatcacctgaggtcaggagttcaagaccagcctggccaagatggtgaaaccccgtctctactaaaaatacaaaaattagccaggcgtcatagcaggcacctgtaatcccagctgctcgggaggctgaggcaggagaatcgcttgaatctgggaggtggaggttgcagtgagccaagatcgcgccattgcactccagcctgggggacaagagcaagacttcatctccaaaaaaacaaaaaaaggaccagcaggttgaatttagcccttccggctctaattctataaataagttagtaaagtcacagggcaggggcttcctaggagtagaagtaccagataatgaccgcacaaccattttttttttttttttttttttttgagacggagtctcgctctgtcgcccaggctggagtgcagtggcgcgatctcggctcactgcaagctccgcctcccgggttcacgccattctcctgcctcagcctcccgcgtagctgggactacaggcgcccgccaccacgcccggctaattttttgtgttttttagtagagacggggtttcaccgtgttagccaggatggtctcgatctcctgacctcgtgatccgcccgcctcggcctcccaaagtgctgggattacaggcgtgagccaccgcgctcggccacaaccatttttaaatgcaaggaacacaaacaggctgattgaaacctgatctcctgccgtcggggagctgggaatccctcaacctattacttccttccatctcctcctggcttttaaattaaatcttattccacagcgtcattctacactttatttatttatttacccgctgccttgttccagaaaggatttaactcggcatattctatagttagccacaagtagactccttaatttaaaaaggagcgagagagaccggggagagacagacccactggcctacccaaagcacatccacatctcactctatcagctccaagctagtccaggcgaccagctttgagggcaaaacacctacctgcccccgagaggcactagttagcatatcctggcttcacaggcccccagatcaccacctcctcggctgctgccttttctctttcaaccaccaagtagaaaaatggcctaatggagtacttcttcctgaaagcaggacttgcctgttagtggtgccaaggctccctaggtgaccttagattttggatttgtacaggccttgacttgaaaggtcttttgcgttttgtggctcctgtcttctcatctgtgagatgagagccatgcccacctttaagtcacacagattaataagtacatctacggaagcaccttggaaaagatgtacaggaggctgtgacctccaagctccagccgactgtttgaagctggagcccgtcacagctcagcccaatccacccaccccccagactaggtcagaccatcaaaagcaacgggagcttggcactgattatccagctatattaaaaaaaaaaaagaagaagacggggcacggtggctcacgcctgtaatcccagcactttgggaggccaaggcgggtggatcacttgaggtcaggagttcgagaccaacctggctaacatggtgaaacgctgcctccactaaaaatactaaaattagctgggcgtggtgacaggcgcctgtagtcccagctactcgggaggctgaggcagaagaatcgcttgaactcgggaggtggaggttgcagtgagccgagatcgtgccattgcactccagcctgggcaacagagtgagactgtctcaaaaaaaaaaaaaaaaaaaagaagaggaagaagaagaaagaaaaagtgacagaaaaattgctgcagtaactcagctggaaacgggtgggcaaacctggagaactagctaatgcctgcctggctatgccacccctcggatctcagtgtgtttatccaagcccacagagaaaggtggggaaggggagctggggagacaaagttcccctcaaagacggtagcatcctttcccagggagagctcaagcataggggggttgggccccaacgaaggagagaaaccaggttccagggtatgtgcattggggcagaaaagcggcagcaactggtgggcgtggggttattgaaatattggcaggttggggaggggactggtgggacacaaatgggaagatggggttgagagaggtcctgaaaaggggttgaggggttttcacaggaaaaaaaggttactggaggggagggtcttcacggcaaggagagaggagcttgggtgagaggtctccatagggaaaataggagatggctgggatttcccccggggaaaatgggaaggggctggatattgggggtctccagagggaaaatgggaggtgtgagtatctcactacaggaaagagggaataagtgggcaaaaatgggtgggtggttgaagcgggggtcttgccacagggaaaccacggtggctgaagatctccgtgggttaagaaatggaggccgagaaggtctccccatgaaaacgggtacctaggaagagctccagagaaaaaagatggatgaggttccccacgcgggaaatggggcttggagggggttaatctctatggggaggtcggggcgggcagtgggggaagaggccactgggaggtccgagttagctggcggggggtctccacccgggaggtcaaggcgggcagtgggggaggaggtcacggggaggtccgtgttggctggtggcggggggtctccaccgggagatccggttgactggcgggctgggggagatcggggttggcggaagggggacgaggggtttcatgggggagatcaagttggccatgggagcggttctctgaggggaggccggggtcggcccgggggtgggggtccccgcacaggcccagcctcaccgtccgccagggcttcactgcactcgaagctgatctcgaaccggaaggggctgtggaaagggctcgggttctccaggaccgccacgttcagcaccgacaccttggccatcgcctcgcctcgccgcgccgcagcaggggcaggggctgtggctgtggcggaggccgcgcctgggtccggtggggtcagtggggtagggctgaccaggtccactcccgcctcttctctccgagaactgaagtgcgcacctagtccgcgcgccgccttcaaatagccggcctccgccctctggccaatcaccgccaacgctccctggcggcgcgcgcaccccctcagccagtcctggagcgccgatcggcgcgcgcccagactcctcggaccaatcagcggagctccctctccgcagcgtgtgaggagggcgaaactatctccaagcttcttagcgtgtccgctggaaaccaatccccagcgtctccgacttggatgtcaacggcgggaatggacggagtcacagcgccggcctccttctggccaatcctgagggttcccgcaccggcgtggcccgcccctcgcctcgcttttccgggagatgcatcccgcagcgcgcagcgccgccacccgccgagcggtggcgcgcggcgctcgctaaagaaggcgggaagggcggtgctcgcacccgaagtgattggcaggagggagtggggcggagataaagagggttttctgagagtttattggctggattggtaatggtggcgggagcagaaggaggctcagctggggattcgctggagagaagcggaagtcgagcgccaccgcggtgttggcgagtgtgaagagagaggaggagcgtttgcggcctcagcgtctgtcaacaggtgagcgtttcctggagcttttctgagtggctcctgacccttgaggtccagcggcgcgggagtccgttgtgaacgttgcgaacgttcggagtggcggtcacgaggcgcgctcagacctcgggaatccggccgggttcggatcccgctttcgcccccgaggggttcggatcccgctctcgcccccgaggggttcggatcccgctctcgcccccgaggggttcggatcccgctctcgcccccgaggggtttggatccctctctcgcccccttgagggctcttgggaggtttcaagcggacggtactgaaaatgggagttccagttcgggggcagaccagtgttcagagtccgggctctgctactcagcgcccgaggcagcgcctccccattcaacgggggccgtggcaattccctgacatgattcatgaccacataatacatccggaaacttctctccaccgcctcccgtctgggccgtcgcccccggcctgggagactccaggtctcagagtctctgcccccacgggcgatcagtgctgcccagtggaaaaataatgccagccgcgcaccaaaattaggtgtaaaattaacattttttggaagccacttttttttttttgagatggaatctcgcgctgtcactcaggctggagtgcaatggcgcgatctcggctcactgcaacctctacctcccgggttcaagcgattctcctgcctcagcctcctgagtagctgggattacaggtgcccaccaccacaaccagctaattttttttctgtattttcagtagagacggggtttcaccatgttggccaggctggtctcgaactcctgacctcaagtgatccgcccgcctcggccttccagagtgctgggattacaggcgtgagccactgtgcccggccatatctttttttattattatttgtaattttagaggctggtcatggaggatttcttgaggccaggagttcaagatcagcctgggcaacataacaagacctcatatctacaaaaaataaaagaataagccaggtgtggtagtgcatacctgtagtgtctgctactcctgaagctgaggcaggaggatctcttgagcccagaatgctccagccactgcactccagcctgagtgtcagagtgagaccctgtctctaaaaattaaaattaaattttaaaaaagaaagttcagtttagctgtcttgatagccgcagttgagtgctcctgagcccgtgtgacaagtggctcctgtattactggacagcgaaggtcagaaacacatttgaccaggtcacttctccggatgagagcattgtctttgaaactctatgctttgtctcctgttaaccacccagctccaacttcaaaccaggctaagtaaccctctttttgttaaaattctgacaagccactcccagtgcaaagcctctgcccagaacctcttctcctaggctcttggcatggcttatgccttcttgtcattcaagtctctgttcaaatgtcctctccccagagaggcctttctaagggtgctctggacagtgttcaaactcacaggccgtacgcctgaacagcactgagccaaggcactagtatttcttacccagtcacctctgtgggctcactaggactcactcactgtgctagtatgttttccttttccttttctttttaaacaatccagttcctgtgggattttttttttttaatagaggtctgttgcccaggctggagtgcaagtggcataatcgtggctcactataacctggaactcttgggctcaagtgatcctcccacctcagcctcccgagtggctgggatcaccagtgcgtgccaccatgcctaatttgttttattttattttattttttttttgagagggagtcttgctctgtcactcaggctggaatgcagtggcgcaatctcagctcactgcaacctcctgcttccagcttcaagcgattctcccacctcagcctcccgagtagctgggactacaggcacacgctaccttacccagctaatttttgtatttttagtaaagatggggtttcactatgttggccaggctggtctcaaactcctgacctcaggtgatccactcacctcggccgcccaaagtgctgagattacaggcatgagccaccgtgccctgcctcttatactttttaaattttttgtagagacagggtctcgctgttgcccaggctggtcttgaaactcctggcctcaagcagtccacctatcttgtccttaagtgctgggattacagcgcctagcccatttttggtatctacatctcacattaagttaagaaaaattctttttagctgttaaaaaatcgaaagctttgtttttattcttttgaaattatttggcttcaaggaaactcacatttatgattcgcttgatttcttggcaatcattgcatacttagggatatttgtgatttgagaaaatctaatttccaaatgtaattcgattgcttatgaatactaaatttaatgattaatgcagttgtcatgatgtcacatttctagatgcttaattaaacatttattcattccaactttgtagttttctctttgcattgtggaacttttttccctttatccctgtccctgaccttttcgtagcccctgagaagctcatgatccaccagcattatttccgtggcgctaatgaagaatgtggccctgtctatgatgcattctccttacagctggctgaatgatcttcacttgtaaaccagatcatgtcattactctgcttaaaaccttcagaggcttatcctacttagaatgaaacctaagatctttcctatggcttaggcggccctgcgtggtggcctcagctgacctctcaggcctcatctaccattcttcctcttgtcaccgctctcaagcccagctggctttatttcccttctttcaacacacccagcttatttctgccgcagggctttgcacttgccgttccctctgcctggaatgtgcttcctccagataattgcatggctgtctctttctcttcgcttgtggttcagctcaaatgtcctctgaaagaagacttcccagagtaccctatttaaagtagcactttcttggccgggcgcggtggctcatgcctgtaatcccagcactttgggaggccaaggcaggcggatcacgaggtcaggagatcgagaccatcctggctaacatggtgaaaccgcatctctactaaaaatacaaaaaattagccgggcgtggtggcgggcgcctgtagtcccagctacttgggaggctgaggcaggtgaatcgcttgaatctgagaggtgagggttgcagtgagctgagatcgtgcctctgcaatccagcctgggtgacagagcaagactccgtgtcaaaaaaaataaataaataaataaagtagctttttcttaatcacatcactcagttttatgatcttagtaacgcatatcagaatttgtacttattttcgggtgggcatggtggctcacacctataatcccagcactttaggaggccaaggcgggccggtcacttgaggtcaggagttcgagaccagcctggccaacatggcaagaccccgtttctactaaaaaaaaaaaatacaaaataaataaataaataaataaataaattagctgggcgtggtggcacgtgcctgtagtcccagctgctcaggaggcagaagaattgcttgaaccggggaggcagaggctgcaatgagccgagatcacgccactgcactcaagcctgggcaactgagagagattccatcttaaaaagaaaaaaagaatttctacttattttggttttaaattgtgcttattatctcatcatccctcagtagattgaaagctggttgtgagaagagatctcgcctagctcacacctctcaatgttgtacttccagagcttagcagaggacgtggctcatagaaagtcctcaatcaatttttcaaaaagaataaatctggctgggcgcagtgagtcacacactctgggaggccgaggtgggcggattaccaggtcaggagatcgagaccatcatggcaaacatgattaaaacctgtctctactaaaatacaaaaaattagccagccgtggtggtgcgtacctgtagtcctagctacttgggaggctgaggcaggggaattgcttgaacctgggaggtggaggttgcagtgagcctagattgcaccactgcactccagtctggtgacagaggaagactccgtctcaaaaaaaaaaagaataaatctatgtaaagggtgggtttagcatagtacctggaatgtgaaaagtactcaataaacatgaaccagccaggtgcagtggctcacgcctgtaatcccagcactttgggaggctgaggcgggtagattgcttgacctcaggagttcgagaccagcctgggcaaaaccctgtctctacaaaacataaaaaaattagccgggtgtggtggcatgtgcctgtggtcccagctactcaggaggctgaggtgagaggattgcttgagccctgggggcagaggttgcagtgaaccaagatctcaccactgcactccagcttagctaggcaacagagtgagaccctgtctaaaaacaaacaaaagactgaactgttagtagcatatagtaataagcagatacgtcttcattcttgtttaatacttcaggtgcacacatgctcgagaaagtataagaagtgctatagcaaaatactgttacccagcttaacagctaaaacattagagatgcaactgaagggccctatacccctacatcaaacccattcctcttcctttttcctcacatgtaaccacaaccctgaatttggtgtttacagtcttctgtgcatatcggcgtgtatctttaaacaatatatagtattgtttgtcatgttctatacttttatataaatggtgtctgcgcaatttagagttaacctagcaggcctgagactgctatccttagaaagacctgtttgcaagattggcccttggctgatatctaggaacttggatttcaggagggttcctgccgttccccaaatgatgagtgcctaaactgtttccaccaacaatgtggttcatgttgaacacctgctctccttctggagtctggcattttggtacacgaccacccccaagtacaactctggtcactgagtaatgagcttccctggtagaccgcctatccgtcgtgctgtcatacttggcggtaggaattgatggagtcctgtgtgactccactaggagaggactcttagaagcttgtcctggtttcctctggacttcagctcctgcatcttttccctttgctgattgtgccttgtgtctcttcactatcataaatcacagccatgcctacgcttccaagcaaaatcctgtgactcctcttagtgagtcattgaacctcagggtggtcttggggacctctgatagcaggatcatactgggtgtatcctgacagagctggcactaaggtggcactgggtcctgccttctgaaacttgctttttttaatccagtgtaatgcttttgagatttatctatgtggaaacgtgtatagctctaattcacttattttcactgctatacagctgtgctgataaggtaaccactagccacatgtggctatttagattaaaattagacgaaacaaataatctacttccccagacacactagtcacatttcacatgttcagcaggagcctgtggctagtggccaccatggtgtatagagaacatagagaggaaacatttccatgagaacagagagttttgttggacagtgtttatcaattcacttggttgaaatttagggtgttttcagttttctaccattacaaacagtgctgcagtatgcgttggtatctatgtctccttgaacacatgtaggagttactctgggagataaacctaggagttgaagtgctggacggggggttgcggaagtattcatcttttcaagatactgctaatctgctcttcggaatcatggtactggttctcactcccctcgttagtgttcctgttgctcagtgtccttatcttttatttttatttttatttttgagacagagtttcgctcttgttgcccaagctagagttcaatggcacgatctcggcctcccgggttcaagcgccgcctcccgggttcaagcgattctcttgtctcagccttctgagtagctgggattacaggtgtgcaccaccacgcctggctaatttttgtatttttagtatagatggggtttcaccatgttagccaggctggtatcgaactcctgaccttaggtgatctgcccgcctcagcttcccaaagtgctgggattacatgtatgagccaccgcacccagacatcttttaatttttataatgttttgatgttcagcatttttaaaaattattattattattattattatttgagacaaagtcttgctttgtcgcccagggtgaagtgcaatggtgtgaacttggctcactgcaacctccgcctcccgggttcaagcaattctcctgcctcagcctcccgaatagctttttggaccagtctctcatgcctgtagtcccagcactttgggaggccgaggcgggcgggtcacctgaggtcaggagtttgacaccaacctggccaacatggctaaaccctatctcttctaaaaatacaaaaagttgccggggttggcggcgggtgcctgtaattccagctattcaggaggctgaggcaggagaatctcttgaacccgggaggctgaggttgcagtgagctgagattgcaccactgcactccagtctgggcaacagagtgagactctgtctcaaaaataaacaaacaaaacatatattctgagaattaaatgagacaaaatgtaggaaagagctttgaaatgatacatttcagcataaatgtaccgtccctaggcacatgcagatgaatgggtgccactaacaactacctgagggtcagaggttgtcaggcacagcaggtttatttttatttttgagacagagtctcactctgtcgccaggctggagtgcagtggcgtgacctcggctcactgcaacctctgcctcccagtcccgagtacctgggactacaggcgcccaccaccacaactggctaatttttttttctttttttttttttagtagagacggggttttgccatgttggccaggctggttttgaattcctgacctcaggtgatccgcccgccttggcctccaaagtgttgggattacaggcgtgagccaccgcgtccagtcaggcacagtgggtttaggttgtgtgtagtgaaggggagagtaaaagacacagaaggactggtcatatttggctctcattgtatgcgggattcgatttcaaatcagagcatgaggtcaaatcacatatagttaaaattatctactcttttttttttttttttttttttgagacgtggtgttgctctgtcacccaggctggagtggagtgtgatcttggttcactgcaacctctgccttttggggttcaagcaattctcctgcctcagcctcttgaataactgggattacaggcgtgcaccaccacgttcagctaatttttgtagttttagtagagttttgccatgttggccaggctggtctcgaactcctggcctcaagcgatctgcccacctcggcctcccaaagtgttgggaatacaggcatgagccactgtgcctggctacaattatctactcttaaaagtccccatgcttgcccacagtgcatctctcagaaagtctagtagattcatttcatcctccagtgtgagaacagattacctcttcttcagctgggcaccagaggaaatactgatcttaggtttttggagccacgctgaattaaaaccttagcatcacacggtgaaactgaacccgctgagggaatggtagattcacagtttctatcattcttttttttctttttaatatatttctttatccttattgaagagcttccatcgcccttcactctcatcttgtgctcactttgggtcttgtgctgaattcagctcccattctttaacagaaatttacatatcgcctgtgtgccagatgctatgctaggctcagatcaagaacccttgcattttcagatcttacattctagccaagaggcagataataaacagataagcaaaacgtaattgctagccagtagtactatgaagacagagcaaggcacagactaggaagttctggagtggcttgggaaggccttctgggaaataggatttcattttcataaactctgcaggagaggaagtcaactctgtggatatggggatgggggagggggcccaagccagcagcgagaacagccggtgcaaaagccctgaggcaggcaagagggtgcctgcatgtttgagtccagcgagtggacggaaggtagggaggacgccagggggtgaggttggagggcctgtaggccattgtgttgacctttacctgtgctttgggtgagataggagagcattggagagttttgagctgaggagggacaaaatctgtttaccaagatcactctggtttctgtgttgagaaaaacctgaagagggacaaacgagctataatatttaggggactgttgtagtggctctggtgaaagatgggtgagaactaattaattctggatatttagaagttagagccaccattgcatttactgtcaaattagatgtggggtatcaaacaagatgagttcaagagaagctccaaggtctttagcttgaatcaaggtatggatggactcacttttagttgaggtgaggaagcctcaaagcctcacgtgggaagaactacagtggtggcagtggtagagatgggggtgggagaggccagggtctcagtttaggacaggttagtttgagatcctaccagataccaggcagagagatggggtaggtaggtgaatatatgtaaatctggagctcaggtaggagttcaggctggagagctacgtttgggggtgatcagtgtataggtagcgtttctttctctctctctctctctttctctttctttccttttctttcttttctttttcttctttccttcctttctctttctttctccgtttctcttttcctttctcttctctttcttttctttcttctgatggagtctcagtcgcccaggctggagtgcagtggtgcgatctcagctcactgcaacctccgcctcctgggttccagcgattctcctgcctcagcctcctgagcagctgggactacaggcgctcgccaccacacccagctaatttttgtgtttttagtagagacgggatttcaccttgttggccaggctggtctcgaactcctgacctcgtgatctgcctgcctcggcctcccaaagtgttgggattacaggcatgagccactgcacccacccggaggcatttcaaaccatgagatggggtgaaaccttccagggagtgagagaaaaggtctaaggactgagcccctgggttccccatcattaggaggtcagatgagaaggagccagccatgaagactgggaaggagtggctgttgtggggaggtgggtggtgtcctagacacaggtatctttttaaggcagaggggcccggaaaaggatccttgtagtttgagtagttatgcctctctctgagcatgggcagttcgttggtgaactgacaacgtgaaatacacatgatgcaattccaccgtgtgtcaagtttgaaagcactccctgccagtagcgtgtgggagtgtaggaatggcaattgtaatgagacatcacagtgtaaaattcctgagctctgctctagtacagcctggggacagacgtctgggccaagaagggcttctgtgagacagcatggaacagtggcctggtcagagagacttgggcatgcatctgagggctgtaagcctcagtttccccatctgtaaaatggaactctaatcgctgtctccatctgggaggattttgtgaggattcagagaaactgcacatgaaatgctccaccaggcccaggaacttaccaaggtctcataaacgtgaatgattctataactgtcaagcctctgccaggggttctgaatgctcgagtgcagaccagagcccatggggacgcccctgtgcagatctgctcaaccatttctttctttcttttttgagacagaatttcactctatagcccaggctggagtgcagtggtacgatcttggcttactgcaacctctgcctcccagccgggttcaagcaattctcctgccttagcctcccaagtagctgggaccacaggtgcttgccaccacgcccagctaattttgtctttttagtagagatggggtttcaccatgttgactaggctagtctcaaactcctggcctcaagtgatccacccacctcggcctcccaaaatgctgggattacaggcctgagccaccgcgcccagctattcacccatttcttactcccccactcaagaagtcacaccactcttgtcattccaagaaatcttaatttctttattgtttgactttttgactcaacaatttttttaaaactttttgtttttttctgaaacgttcttgttgttatgagccttttgttttgttctcgttaaatgcactcgacccaaaattggtttggcatatcgaaaaggagaccaaggagggaggggctggggcgtgggaggtggggaggaggcccgaatggacagaaagttgaggataagagaagaggaacatagagacagccagaaagacatggggaaagagtgttggagacagagaaaggggaaggcaagggaaagccaaaagaaaccaaaatccagagaaaaagaattaacaagatttaggagcaaacgagttcaggagcctaaggaagggagtaggagaggaaaccaagacccttctctgtaccgtcccagctggggtgggggcgtcaaggcaccaggtctggttaggttggggggacacctgggctctgggggcggctttgcactggactgcagtgatgtccagccccagcagggggccctgccacacagctctgaggcctggaagccacccggcgatgccggctggaacaggacccgatacaccctctctccctttgattgtccgagtctggagagatacaaggaaggctgggcagggaggaagttggcctctctgtgtgcctcagccccctggaactctcctggccctcctcctggtgtcgggggcagccacaggctgggctgcttcccgggacaggccagctcctcgcctgctcatgcctcctgcccgctcttcacagacctctgaccacccctccacacaacagagctcccagcctagtgcagtccgggaagggccatggaactgtcccttgccctcctcagagtcgtctggcaagactgtccctggcctcacttctcctccccatctagacttcacccatggtcttctggtgtaatgggttaggcctttctaccagaaaaagccagagttggaacccaaccccacctcttccccacacctgttcccttacacgggacaaaccaccatctttggtctgaccccttctcccctaattgatggggacaagccagccccagctccccgggagaagggaggggctttctagcagcaaaaagggtccctccagccacctacctgtccccttccccccagttccttcctagagcccctcccccttaacccaacaaagttcatggcagcagcaggctgagacccgaagatgtttgaaaactcatggcacttgtgagaaaaggaggggcagagagatggggagaggtcagagcagaggtggaggggccacctctggggaaacggcaatgcaggggctgggctagggtggcctggggctatgctgcccctagagttgagggaagggggctggggaggctggcctgacaggctggagaggagggggccgggacaggtgctcaggacacatcccgagcctggagcttccggggtctgggatttggggtcaagccgcccagaacatgggtgtcccgaccccagccctggcacctggcttcgtcttccctgcgggaaggtggaggatagggaaggtgatctctcacctttgcccctccccatcccccagaccgccttgccgttcccagcaccctcctcagccatacccatgccctccacaaccccagtgcctccccattttccttctgccatcaacctctctaggtgggaaatcagccccatcttccccggcgagagtccccagagcaatatacaagaagcaggaactcaaagggacagcgcagccatcttgacaaagcatctttgggtgtgaagaggtctcccccgggccggtggggagggaagggggagacaggcctctggtcctggggcaggcagtgagaggtacacgccccagaagggctgatgatgccgggcaggcggagcaggaaaggagggtgccaggaaggaaatgggttctttgtttcgctgttgcatctagattttgttttctgtctctggattgtaaaaagctgctctggcggcccgcccgccccggcggggactggggatgcacgtacacggagaagtcctggctgccaggccagcagcgctgctctgctccggagaaagcccgggctggcccgggccgcaggctcccggtggcttcaagtgatgagattttttttcttttctttttttttttttttgtcttttttttttcttttccatttcgttgaaatatttacagcaatggggaaggaggaggagagaggaaggagtaagagggccccctagggaaagatccaagcccaggacccactccccagggagatccagacccaaaatctgctccccagatagccgagcccacaggactgggaactgcccaaatatggccacccctgtgggctgggggccctgcggggagttgtgcttcatcaggagtcgccccaagggagggggtcattgggtgcactgggaggcagagggggcaggtttgcttgcggggcagggaccaagagcaaggggaaaggagcttcagagaaagttcaacctttaaaccaccagccaccaccgcccagtccccctgccctgcggccttttcccagtctccagggagcagggaattacagcgcaggaggaacctgtccatctgtcctgcctcactgctccctctgggtgcagccggcagcatttctggctgcggagaggagcagctaacaggttccatccagtgggggcctttggcaacctcagaagctgcccctccctgcccaggaaactaaagccctcatttcccttcacagggtagaagggtgggagaggggagagtctggaagtgggctgcacccttccaagttctccctcctcactcccctggggtcctctgggctcctcctcactacacttcccccaaatagagctggtgcgtgtggctggtgggaaaccctgtctgtgaaccctggcacctcaggcccccaggttagagtcccctgaggggactgtagggcccatggctgaggggcacctggagagagtggcccaccagccactgcctccatctgtctccctctcccaccagagccctgcccagggttccctccctggcctgggccaccagcccctggtccatgaggtgccctcagagactggtgaccagctgcatctgcccgtccccatcgggccctggcccctcaaggcctggggctgccaggtagccctcgtggctaggacgccgcacctggtagtagccctgcaggggattccgggccaccagggctggcgggcgcgaggtgtagtagatttcgggggggccggggggtgcgggagggggtgggggcagggcctcactgggcccctcagggctgctgtccgggtaggagggtgagtcccgcaggttggccccgctggcatagagggagtcccggccaggaggggaggagaggggccggctggtggcgccgtcctcggccgtgcagctctccgactcgtccagatcgctctggtacagcaccgactgggcccggggcagcagcagaggctcctccagggccttatagagaagttcaatctcggcccggtcagcacccccgggcccgcccgcctcttcctcgcccccgccccctggcacaggtggcacagggggctcaggcggtggagggcccttggccgcgctgctgctcccccgcaggttgttgtgcaccagctctgagatgatcatcttctcaaaggccgccgcatcggctaggttccggcctcggggcggctcagggcccccatccccgggagggaaatccccacttcgcaaggagtaactgttattgaagttgccgttcaggggcagggtgtccatgccacaggcttcccggcctcccaaggggtgctctgcagggcagaaaggggctggtcaggttgaagaggggccctggatgcactaggggacagtgagggggtgcggtccatgtggagaagtgggcttgattcctgctggttttccgtaggcttccccctgccccctggatctctgatctcacattccctttctccctcactggcactagacacaccagcccagcagcgtattgatgaaaggtgggggacaaggaccagttcccccaggatctcatccccagctggaggttcagaatctcagcagtgtgaggaggcctgggcaacaggatcgctttcctgtgctcagaccctcagcacttaacagcccaaactcaatgaacaccatccattatcctccattcggctgccagaggctgtgtgtcggggggtggggaaatgtgggcatggggaggcatcccgagttctcctccttaagtgaggccgtctgagaaggccactgtctgtccctctcccagcctcagaaacatccccagggaagagtcacacttactgggttcccggtagctccctgcaggtggcagccagaagagagaagagaaaaggcaaggatgagctcgaaatgcaagtccaggctccagttctggggcacagaacatcccatgcagaggtcccttgggacacaaaccctccatttcccaacctgggatgtttcccccgtgctctcacctggggagttgaagacagggggcgaggagggattgaagcccactgactcggcgatgagggtgttgtagggactggtgcccccacggggctgcagcacggggttggtcagcaggtggttccccatggtacctggccaaaggatcagaggtcacaaggcagccgggagcctccagagactgaagccagaggcagaaggatgccttctcacctcggttcagggtgggggtgctgttgatgtcacccgccatgaaggaggactccgtctgtttcctcacagtgtcattccacatcctccgaattcggctctgggaacacaacccaaatgtgaggggatccttgggccacccaccctctggcgtctttctgagactgctcacctgatcatcacgatcagaaacctaggccaagccactccccacctctcaggctccaggttccaacactcagccccagggagtcctgtctggcccgatacctgggtccctgtgtagtagcgggtgttgcttcgcatggctgaggtcttgagggatccgtgagtgcccccgggtggggagcggatgcagcagtaggagtgacgcaggcacttgctgtactccttgtgcacctgggaggtggaggacagtcagctggctgggacactggcctcctctgtgatccagtctcccacagggctggtcacaagacaggcagccttgggaggccggagaccgagcttccaatgactgtgttcccctgttcagcgacttgcaggccacggaagccttgatgtcccctgtcccccaacagccagccgatcaggtttcactctcttcttactcaggcccatcctcttctccacctcctctgacagtttttcattcattcataaaatcaacagagcattattgagcatccgctatgtgccaggcacaatttaggcctcagggaaggtatggaacacaacagacacaaatccctacctctgagagcttatatttcagtagacagagacagaacatagatgaaaatataaatatgcaagctgttggatgctgttaggtgctgcggagaaaactatggccagaaagggggttaggcagtgctgacttgggagcaggttgtgattttttttttttttttttttttgagatggaatcttgcactgtcactcgggctggagtgcaatggtgcaatcttggctcactgcaacctccacctccctggttcacacgattctcctgccacagcctcctgagtagctgggattacaggcgcacaccaccacacctggctaatttttttttttttttttgtatttttagtagagacggggtttcaccatgttggccagactggttgtgattttaaatagatcagaggaggccaggcatggtggctcacacctgtaatcccagcactttggaaggcagaggtgggtggatcacctgaggtcaggagttcgagaccagcctgggcaacatggtgaaaccccacctctactaaaaatacaaaaattagctggtcgtggcagtgggcgtctgtaatcccagctagttggcaggagaattgcttgaagctgggggggtggaggttgcagtgagccgagatcgcgccattgcactctagcctggggacagaacgagactctgtctcaaaaataataatgataataaaaaaaaaacctaaaaaaataaatagatcagaggaggcctcatttaagccaaggtaagaacgggggctgcaccctgagggtccacatctaggtgtctgagagcagaggttggagggaggggagccgaggggcccagatcagaccataggggcctggggtcccctgaaaggacattgctgccactgcgtgtgaggtgggggctgtgaaaacactgcctttgaccgtgtgtccaaggaggggccaggacaatgttggacagagcagggacacaggccacctcctcccttgcaaccaggattctcatgatcactgcctctgccatcccctgccttaagccttacctgcctcaccactccccaagtccaacagcagtctccatggcctgcactgctgccaggactgactctacaaatgcctcagctccgtctccccagcttcagtcctgagggtgctgccagtatccccattccctgcccatgttccccagctactgttgtcccctttggtttttttaaatagagacggggtctctgttgcccaggctggtcttgaatttctgggcttaagcaatcctcctgcctcagcctcccaaagtgctgggattacaggcatgagccactgcacccagccctttgtatgtgtggtttttttgtttgtttgttttggagacagagttttgctctgttgcccagactggagtgcagtggcgcaatcttggctcactgcaacctctgcctttggggttcaagcaattctcctgcctcagcccctcagcctcccaagtagctgggactacaggcgcccaccaccacaccaggctaatttttatattttttaagtagagacggggtttcaccatgttggccaggctggtctggaactcctgacctcaggtgatccgcccgcctcagcctcctaaagtgctgggattacaggcgtgagccaccgtgtccggactgtatgtttttttaagattcagattttaacacatttattttaaaaagatcctttctatcaccacaaaattcacaattctttccagaactatgaatgtaggcagtgctccctcagggtggctcccaaagtcctccctctcccaggcctgactcgtggccctcatggtggtgagggttccccattaccaaatctgttctgctctcactcctctaagttgctgtatcttgttttccagaaccctcttcacccgtggttaaaccctccctaaccctgagctcgtgctcccctcccggtggacgcagacctgaccacagaagccctgcagcactcactgggggcttgagggagcccctgagtcccctccaccctcgccgccttctcctgggtacccaggaaacgtctccaagggaggctgtgacccaggaccccgcctcgacctcaccttcttctgtaaggcgcagtgaaagacgaagatgaagaccccctggaaggcgttgaaggtggtgaagagataggccatgaccaccgactccttgttgatgaagaggaggccgaaagcccaggtgaggcccagcaggaacagcagcgcgatggcccccagcgcccaggatctgggagtggggcgacaggggagtcaaagtacccgccggaggggacggcctcagcccaggcctcccctgcagcctacaacgggggcccttgggtgggcctgggcactgtctgcaaagccctgagcgggccgagtgggccttgggggcagtggcctgcccaggacacctccaccggagcctgggcctgagggaaaggtactgggtcaggggtcggggtattgtgaacatcagttattcctctgccaacttcattgtttctgctaaatttccagaccacttaggctatatttgctgcctatttctctttaagttgcccttaaacagactcaccttttgaatttagcctcagcctacataccgatgcccctaaaaccacaggttggacgtgctaatgatacgctatctaagacccattaagtaggtacatagtgaacacaatagaacacccctgttggtacttaaaattgcaatgtgtgtcaccagaggtgacagcactaccttttaggacaccctggaagaggtgggcccagcgtggggcgggggtgggtgatggggcagggggcaggcaggggcgaggctcacttaatgttgtccaggcggctggagtcgggcttgagcacagatgagcttcggatcatcttgtgcagggtcaccatgaggaacaccaggttgacctgggggcgggacaaggggcaggctgggctgagagtggccctgcctccctcagtgagcactgaggctagggcccagcctggcgaaatctcagctgtggccctcgcctctgctgggagaaccccgtacctgcccctgaggtgcccgctgtgcagcggtgagctgattggcatgaccggcaatttaatgccactcctggctgctgggaggacaaggcccatggcctgacacacactaggggctcaaatcacagccccccaggcgagcagccctcagcactggagctccatggacccagcacactttcatcctctcagccggtggctcagttccgatgtgtggagagagagagagtgtgtgtgtgtgtggggggggtggggggcgggggcaggggctggggtcaaggccagcctggatgaaggaagatgtggtgctaggggtgtcacctcccaactcaccacgataacgaaggagactggcccgatgaaactccagatgaagtaattgtccactcggagccagcagctgtaaaggaaacagggccggggtatagagagaagccgaggagccattcccagcgactcatgaaggcctaggactctgcaggctgcagcctctgggatcaggaggaggaagggactaccgccctgagggtcctggtccaaggggtgccgcccagcagggaaccaggtgggagggtgcagggctgggaggtggaaactcacgccttctcggtgccgtagctgcggtagtcaatggcagccgcgatgcccaccaccagggccgggaagcagtagccacccaggtagtagtacttggtgcgggaatactcgctctcaaacacctccactagtagcaggtagaggtgcacgccctccaggcacagccaggagaaggcagccaggaagaaatagtgcagcaggccggcgaagatggggcaggcaatctgcggggagcactgagggtgaggggctgctgcctggacaggtgtcccccttcttctcccggcccccaggcgctggccgtcacctgccctagagtcccagcccacctcatactgagtcttgtcgatcccgaccaggaagagcagctcagccaggaagaggttgatgcacaggttcttgtggatggtgttgcggtcggtctgcagcccccgcaggaagcagaaggtggagatgcagatggccaagcagaccagggagatcacaatgcccacccaggtgatgaccgacagcagcagctcgttgatgcggccctggtactggggacaggaacagggggcacgctcagggcctttggttttgcacgctgggctcagccaggtgccagccacagacagggccctgggcaaggccatgggccgtgaggacctctggtgccgccaacctggcagccctcacccctctgcacgcagcaatgcgctcacttcctcatgctctggaaggcttgtggagagatgaccaacgtaacaccaacttgcttctccagagtgccttgggagacggtgggatcatggccatagaggaccagacgcatggcctcatgccccaggcaagaccaggggccccccacacccatggggctagcctcccctggtactgcccgtgatctctctaggatgccatgcaaagccaggccagcaatcgggcctgcctggaggagcagagcaccagccagcttacgatctcacggtgagccatgagcacagcgaagttggtgaggtggctgcaggcacacgtggtatgggtcttgttggactccaccaggcggcagccttgggtcgaccagtagcccagcatggaacgctccgagtagttccagaaggagcagttagcattgaagtggttcttgtcctgttgtgtggtggcaccagggtgtcataactagagtcagaaccggggagtcccattccgaccccccacacctggcaacagggatggtaccaagtatcaaagaagtgcctggggtctggggctccagttgacattctgagagctctggggacaaatggcccaagctctaaagtggaagaacccataacttgttctggaggtgagcacatggaggggcaggtacacagcctgggaacacagagggtacagggacccccatggagggagggggacggctcagctcacctccaggtgggccacggtgaagatgacagggtccatgaggaagacgcggctggactccttgttgatggatgctgcgatgacctgtgagttcaccactagagaggcgcccccagggccacccgggcctgcttcgccggccagcttcactgtggcattctccgtggacaggaagaggcccaggttgttgtagaggatgaagacaactttgaccacccctggtgagaacaggcacgtttggatgtgtcagcatcctcagctggcgcacctccatccaggcccctggcttcccagctcagccagctcctcagcccttggccacgctggccactgggacctctgaagccagtccatagcccaggcaggtgggggtcagggagccctgtccacaagaccactgctcagctgaaggcagttctaaacagcagggcagtgtgccaggacacacaagctgggcctccgacccacccattctcactgtgtgaccttgggcaagcccctgacctctctgagccttcatctcaatggccccatcctctctgagctgtgaggcccaggagccagctttgcaactgtaaggctcacccttagggctctgcagcacttcagggcccatgaatcccctcaaattttacactagcatgagaaaaggtcagcaccgctgccctctacaaatggcacagagacgctggcacagagctggggggtgggggtggggctgcttccccacccgaggccccgccggggacactgaccattgcggctgttctgcttgatggttttggcagacagctggatggagttctttctcgggtactcctcctgggggaacaccagctcctgcacctggccctctgtgttcaggactgtgacctccaggactgtggggacaggggaaggcaaggcatacacagttggggtctgttcccagtccaggggctcaggctgcagaacgagactctggcaagatgcccaagggtcggatagcccccctgtggcctccaggccagaaccccgtggtttaaggttcgtatctgagtttgccctgggtgactgtggcactcacccacgttctccttggcagccaggaagcgggcaggctccctgacattgtcggccagcaggaaggcgccctcctccaggacgtcgaggagcatggtggccgtgtgcacctgctccgtggcattcatgtccttccaggactccagagcttctggccggagcagattgtccactgtctccaccacggcctgcacaggcagagggcatggtgctgtgagccccccaacaccctctaattcctgggggtgggctctgcatgccctcttctcaacctccacccctaatccccccatcagctggagcccacggtccttacactgggaccccctgggtctcaccttgatataatccttacaagttctctctcgcttgtgcatctagaaagagatggaggtgatgtcaggccaggcctctgggtgccggttccctcaccctaatactgtcacatctggatagctctctcgtctgcggttaccactgacccagggctgggctatcagcaagacattcctcagggatccccaacccccaggaccatccggggcagcacaggagtgagacccggcagtccttggcggagaggggggggtccttcctctctgaggaaaggagtggaggtggcagcctggctgggaggtaccaggtcaggtacttcccaagcccctgggggcaggcgccctccccataccaggtcagcgccaccgccaggccccaccttgttgtagttcttgccggctgactcgcgctcgatgggccgcagggcctgcagctgggcatccaggatgtccagcagctgctccatcagcttcacagaggaggagacgtcccccgcgtagatggagccccgggtgtgtcgggccagctcgctggcgatgttggccgcgttctccccactcttgatctgcatgaggtgggggcgggaagggggaatcccaggactgtcagggaccatcctgccctccccggcttccctggcctgtgcagcctctcctatctctctctccacttccccatcgccatctgccccttcccaccccatctgtccctgctccctttgtaggccagggaggtgaccccacagtcctgccttccagacctgccagcccatgtctccccagctgctccacgacccccgctgggccctgggccctgggcccgagcacatgtgcctgcctgcgaggggtggtggctggtaccttctgggccacctggttgacccagggggaggtgcagttgctgaggtcagggccccgggggttccagagccccaaggctggtagacactggaaggaggcaattcctgcagggacagacagacaggaacagacaagggagccaaagggaagaagagaaggatgggacagagagggggaaaggagatgacagagagtgggggacgagcgggcgaagagggaggtgagggaaacacggagaaacagacatgaagcgggctggacagtcgaaagaggcgccactcacttcccctgagctctccctcctgcccccttctgtctttgcctccagagttagaaccttccagcaaggcccatcttgaacgccccctctccacgaagcacctgccaaccctcccctcagatctccaggacacacggccctgccctttttgcacttcagctggccatccatgtgaagctgactgtgcctggggctgtggcaggtcagcctgaggccgggagccaggtcacctcctgcggactccctgcaggttctgcaggtggggccaggggcactgagtggctcctgtgccctgagagctctgctggtcactggggatgacccctgccctcagaaaacctctgctccgcagtagagacccccacccacacatgcatctgtgctaagctgctgggggcatggcccccatccctcccctggctgcagcctctgtactcacctcgagtccccttggggcagggcctctccaccagcatgccctgctgggtggccggccactggacccgccgtacctctcggggctcgcagaagagctcaggggacacgtgtagattcggggctgggggccgccgggtgctggggactggggctgtggctggaggcagatcaggtcccagctggttgatggcacccactgggtgcgtggtgaggggtgcccggcggagcggggtggtggctgcgggcgaggctgtgctggtgaggggcgtgggcctggctgtggtggtcgtgctgaggggtggggaagtggctgggcctggagaggggatacgagacagggtcatccccatgctcagggccatgccacagtgtgcttgggcagggggtcccaggccatcttagcatcttcctcatctactgaagtggaaacacgtgccgggccccactgggtctatgagttgatctcccctggccgctctgtgcccaccaaagtcccttatgcccatgggcccatataaagtagcaaagagtggtaaaaatccacgatgtgtaccataaggtctgagagaacggtcaggggagaggcagggacagaggtgtctgggggacaggaatcctcccaggttgagcccgagggcaggagccctccccaatccaggtcagccccgccaccaggtgggggctgaataccaccgccccccatcctcgttctagctgactttggcttatgtaacctggctatgctccttccttctgggggcctcaactcccccttttgcaaacaagatggggttagatcgggctccctggagccctggggtggcacagagctagcagggcagctaggcggggcaaaagaagactgcagagttgccctcagcccggtcagcatcagcagctcagctcttttgtggatactggacttccacccaggattttggtggatccaagggttcctggagtaaaggtgcccaggcccctgggagaggcactgcagttcagtggttgggaggctgggttcaaatcctcaaataacttaatcccctacccacacagagcctcagtgtcatctgtaaaacagggcagtaaggatccctgtgtcatagaccgtgaggagacgagttaatgactgtgaagtgcttagaacagcgtctgtcacatgctgtgaatttcctttacctcccgatccccaagagctcacaggatggggctccccactctgggacccaggggtgggtgggggtggaggggacaaaggcaagcaggctccatgcctggaagtgagtcgtcctcaccagcactggggtcgggcggcccgaactccaggctgtagcgcaccacgaaatagttgttccagacgtacagctggttgtcgcgagggttgtagtcaacggaggagatgaactggtaggggttggggaaggtgaggctgacaggctcctcgcggttggcattggtgttgaaggcatagtccacgcggttgccagccgcctcgctgtcatcatccacgtacacggaacgcaggacgtacaggaccccacacaccatgaaggcgttggatgccgagcgcttgtcgtaacccgtctcccacgtgccctcaaagcgcagtgtgtaggggttcagctggctcaccaccagccgcccgttgttgccctcagtggcgtagatgacccacagcccgttctcgtccaccgccaggtcaatgtcggtctttccgccccagcggtagggcgaggtgtcatggtagttggcggtattgatgaccgtctccccgctcttgatgcgcgtccgtaggtcatacttgacgatgttgcgcgtgcgctccttgttgtagaagacggcaccatcgtagaccacaaagcctgtgccatccacgcggttgggcaggcggtaggtggtggtgtggcgggcggccacgtagtcctcccacgaggcatactcagtcagtgtgtccgtgcggtaggggatccagggcatcacgtagatgcggtcacccgcctgcagcgggtccttgcaccatgcgccagactggtgctctgactcgtgtgtcgaggtgggctccagcaccttctgcagggtccctgggcacacgaagactgggcagagtgggcgggaggggaggaggtaggagagaaggggcagaggcgagagggaggagagagagagagagagagagagagagagagaggggggagagaggcaagttggtcacgctgctggtggggagccaggttgtcccctcctgctgctgcagtcacggttgcttggtatggctggtgatgggaagggggtttccgggctgggacccgaccccctccccacgccctgcccagctgcccctctccctggaaatgtgaaccctgaaggccattaagagcggggttagtgaggggaagtggtgcccctcttcccttccctggctgctagagaccccacaggctggggaggagtttggcaagagccctcccagaggtggtcctgtgtgatttaagtgggggcagaatctccccgctacagtcactcctgactttgacggtccagggactcagcacccggccccttctccctcttctctgccacttagggaagagctagggtccaggatcccatccttcaccaaccacacccggacagtgtttttttttttaactcctctttcttcctcctgcaaaaattgcaaggtagagtggtgtttccatacccactgtgggtgtcaggagtgtctccctattccaggataggggtttcaactctctccccaggttcctgatgcagcctgctccccaccccccacccagtacccacgaagtcagtagccgaggaagggattcccagaggcagctcccaggctaggacggggaatgaaagagtctggcccctcctggagggcgcccagccctgcccccagccggcagggtctctcatggggtctggctcagcagcagacagtggcactgtgcacaggggtgggggtggggacatggagagggacagggctcccgggagagttggggagggagaggagagctgtgcagagggaagagagacaagggcgtatggggcttggcgaggtcctggctccgtgggaggctgcgctgcaaaccacctgggaagaaagggttagtgctggcggaggagagaggggtgagcagagaattcactccaaggcccaggcccgactgagggtccctcaggggggcagtcccaggtccagctcggagggggcaggggagggaaccaggcgctaggataaagacccagcccgccccagccaggccccccacctcccctggcccggaccccgatttacctgcgaccatccccggctcgggaagagggaccaaggcagcgctgatgtcagaaaggtggggggccccgccccacccccccaatccctgaaaaggaggaaaacctcaactgcatctcgttggccactgctggccggcccacccttgcccagtcacgtcccagcaccacctactcctaacctccccttgactgatccgggggtcagtgtggccagacaccccacctcctcccagagtgcgcccctccatccaggatggccgggcctccctcacctcctggctggcagaacccacacataggccagggcgagggcacagggcgagggtggagggtttgcagtgaattctctgctcttgcttggcatgtcaccaaagcagctggccccgaggggatcggggggctgggacctggcaccggcttggggggcagccccagtggcaagaggggcttgggctagtcctcattccccacctccagcaggcttgggagggagggggacaggcagcactcccttcacagcatgggaacaatgtggctcaggggccccctggcacaaagcagccaggatgtagtttttgtagagggagaggagcctgggacatagagctgggcaggagccaaaacgaccctggcttgggccctggggactggccatccccctgtccctgatgccctgaggggtcggcctgcccactctgtccagcacactggcctctgcccaagccggtccccacccccaccaggtgtgtggcatctgaggggacgtgtttgtgtgaaggggacggtgggaggcctcagagcctaacctgctcagagggtgtcaggggggaaaaatgtggttagaggtcaacccaggggaagggggagaagatgaggaagggtctgtctggggccttggacagcaaggacccttcaccagcaccaaactcccaatccctcctcttccctcccttgccccgtcaccccacccgccctgccctggccctcgaagagaaaatctccagtggtgccgcatccaaaccagtgggcctgcaagaagagtggctggtgctgggagggagagagactccaggagaaagagaggagactggaggggtgtggtgagggggcggacctggggccagcagcccaggcctctctgagatgggggagaggggaagacggggaggggagcagctcagagggaccctgccccacctccttcggaagggatgctccacagaccactgtaatttcaaggcaaaagggatccctaaaggccatgtcctccagccctgcctgctgctgccggcctcagatgggtaaatttcccaaaactttctggagaggaaatggtcatccctaacatctcaccctagaagcccctcagcagcagcacctccgctccccccaataacagccagtaatggccagccccatccactagggagttctctgctagaaattacggagtctgtggaagtccccagactgtgcccccgccgcccgccgcccatctccctggtcctctaaccacaacagcccagaagaaaccctgactgcagctttgcaagtgtgaaagaaacagagaacacgctcccccacccttcgctcccccaaccacgaggcccgcccccgccccctcgccctcattttttcattttttggcaggctgccccctcccagggctggggacagctgacacccctccccagggctgggcccccagctggtcagagatggggatcaggttgggggtggggaggactggtgctccatgctccaaaacagctctgggccttggaaacatcaaaccagaaggaacttaagccaccaggagcccgagacataggagaatctgctccccaaaaggaaaacaatggtgtcccctccagcccgcctcccatgaaccagaaacatgttataaaaggtacaggggaaggaggaagagagaggggagagacagagagagagagagagagaaagagagagagagagagagacagctcacccggtgccccagtgggggagccggggaagggagtccctccctccccacccgccctggatgcttatacacttctcctgaaggaggcaaaagaagtatgagaaaaggccaggtcccccgaaagggccagggaccaggaaggagggacagagagagacagaaacagcgagagagagaaaatcctgcccaagctcagagaggagcttccgtgggtatctggagggtggagatgcccgtggccgcaccagggctggtcccactgggaggacaacccagggtgggggataccgaccggaccaagtgtgggttggggagagaagaaggggccgggggagggcaggtcacataagtatggtacaggtagaacaaagtgtgagttaggggttagcattggtaacagtgcgtttacctttctgctccacttctactttaagcatcggaagagagagagaaaacaaattgaaaaaaaaaatgtgcaagaaaaaaagagaaaaaaaaagagattaaattgctttcgtttcttttctggcaacacgcccccttttcctttccttcctcgctcctgcttccccaaccccttccgtagcatcagctcgggcccccgcccccaggtcccttcctctgggggtggtcaggtggggtgagagggtgctggggagacagtcagagggacgagggggacacacacaggagggagaagacacagaaagacacaggggtggtaggggggtacaggcaggcagacagagccctcaggtgggagggggcacccttggtgcaaggcgggggcagggagtagggagccccagctgggaggtgggctccggtcagagggggcaccagggagtggtggggtggataagccactcggctcccttcccaccctgcctgctgccctcctgctagaaccaggggccccaggggaaggatttcagtgtctcccagggcctgggcccaccctcagccaagaaacaggctgaactccttcccctttatgctggcctcacccaggtccagctgacttcccccaagccctcacaacccagaagaagcaaacacagagagaaggtggcagagccagacacagaacgacaggcagacgggcagttgcacccgggccccagagagagccagggttggggagacggaggcagagaggtggcgggggtgggggacacagactgggtgggacagcaagtgggggcacagacacgctcccaggctccccaggggcaagtctgaggctcggcttctctgctcaacccacccagggcccgggggcccaggagctgggagctccgccctgcccgctgccctgcggacgggcggcacctaggggaggaaggggcgcggttagactgtgctcagctgcaaagcaaatccagcattagtcgggcttgtccactgtgtgggagggttcccacacatcacgtgccccctgccacccacccctgacccaccctcaccagcactggggtcacccccagcctctgaagccctgggccaggtggctgcccaggccgctccccctctgcatccctggcccctcaggaacttctgactggagggactggctctcctggcccctctctgaaggttccagcagggagctccgcaggggcagcctctgcctcccttcccagcgcctcacccagggcctggcactcaggagatgctcagtgaacattttggggacaagtgagtgcctggcctccctgtcctctagctacctcctgtccccgctttaactccagcctccttcctctggagcatcaggagttagctctgcccccaacatccaccccgtatgtgtgcacacatgtctgcgcgtgtgtgtgtgtgcgtgtgtctcctgtctccccaagggctcaggctatctctcttccatcagacaggcagccactcatcctctgaactgtcctgccctctgtccctggagcctgcctggtctctgtcggttgtagcccctggaccacgctcagggcctcggctccaggaggtttctcagctcctctcctcccctagcttctttcctgcggcttgacctgagcctctcgtctacttgctttggcttccacctggaccgaggaatttttcctgccctttatctcacctgcctcgggagaagttgggtcattatccgttgttattttaattttgattaccacagcaataatcgtaattgacaagaggcattacaaggagctgcaacaaaagcaacgactaccaagtgtccagcactcacgaggggccagcaactatgctacgcacctcactggccgtcttttgagaaccctgtctacagatgggaaaactgaggcacactgaagtgaggccacatggctggcgaaagcaggcaccatttcctttgcatctacagctcgggtgcacacaagcttgacatgcgttgtcgctactccttgtggcttcccagggaaggcttttgacccctctccaccccatcacagatgaataaacaggctcagctggcttaaagggcattggtaatattactgagcacatcctgaaccaggcatgggtctgggcgctggggcggcgggtgaagacgaagcctctgcccttgggaagtttacactcggcactcaaaaccctgccaccaggagcgactttgtggccggccctgggccaagcgcttctcacatgtcatctcatggactcacacctccttccgtagtggcccagagaaattaaatcatttgctcaaggtttcagagccagaaaactcaagagcccagtcgagccttgaacctacacccatctgactgcccccctgtgctgagctcgctgcctcccaccccccttccccgctgtcccagccgcgggagtcagccgtgtccccagtgctgtggggaggcttcaaggagcagatgggcatccccctcggtggtggctgaaggcctcaagcgctgaaaggaaaggacgaagagtaaaagaagaaaattacggaagcacagaagggatcctgtttccccagcatcgagtcacctgtgaggagaaatcaaaggctggcagggaaggttggggtgggaggggagaggagggagagttacagggcctcttagtccccaaacccggcccgccacactcagacaccctgatggccctgccttctccccactcttcccggaggccctaccaccaggttgactacatggaacccattgtgggaggagaagggaagggataatgggaaggagggagggaggagagagggcaggaaaaaggtgatgtcaagggtggggtgctgaggaggagagaccttgtctttgtctgatccctttggccaggtgcaagatggccaggctcctggctccccaaatcactttcttcaggctgcctggaggccaccctcagtccaacatggcggcatttcctttgcagacaggaagtgccacatggtaatggggagaccagtgaggagctatgaatctgttgaaaatgccccccagcccttcaccctgaatctgccaccaggcctcagaggatggtatcccactctatgggtgtagagtccagcttccatgattgggaagaagtgtgtggggagtgagggtgctgagagaacggtgttgagaggggcagtggggtaagtgagagggaagagaaggtagatgagaagggtcagaaaaggtcagaagagtcagaaaaggaagggatgtgagaaggcgagggaggcagatgggggagaaaagcatagaggccaagggagaagagagagacgtaagtgtgccaggcagagcacgggaccatggcctggcagtgtggaaatgagtatagggtgcatgaagaagcagggtgagtgggctggggtaaggagagctggagaaggtgtccccacaggaggggacagagtctgtgaggcgggggagcaggcactgagtgtggacactggtgtctgggattagagaatgtgtgttggagagagcaggcccggctgtccccactgtgcccaggccccatgcatgtgtgcacatgtgtgatgggtcaaggtgtctcctcctcactcactcatgcgagaagggcccgcatccgcacaaggaacaagatgactcactgtaggggacacagtcgtactgcacctccaggtacttgtaggtcccaggacaggggtcaggaaaggcatccgagccggcgaccaccacgcactgggtgcggttgttacaccttcagaggagaaacagggcattgggaaagaaacacatagacggggtggcgggggtgggggtgcatgctccagggtcatggtgtcatagacacccccaaattgggaaggggcagtggagctggaaaccaagtgatatagtttggatctgtgtccatacccaaatctcatgttgaattgtgatctccagtgttggaggtggggcctggtgggaggtgattggatcatgggggcagtttctaatgaatggtttatcaccatcccctccgtgctgttgagatctggttgtttaaaagtgtgtagcacctcccctgttctcttttcctcctactccagccatgtacggcgtgcctgcttccccttcaccttctgctgtgattgtaagtttcctgaggcctccccagaagcagaagctactatgcttcctgtacagcctgcagaactatgagccaattaaatgtcttttctttataaactacccaatctcaggtatttctttataccagtataagaacgaactaacacaccaagcccagaggacttgtgtgggcactttttgtttcctgcctgctctctctttcccaccagggttcttctattttcagccccagcacagcatcatcctcagggctaagaaggaggagtcacccgctaaacagtgctttcctggccacccctcatctctttcattgtgagtgtagctgacactattatatccttggcatttttctttaaatggactttaaagcccctgcgctgttcactggagagtaatacatgtgaagccatgcacgtgaggtggtgtctctgcaaacttacgatcaatgaaatgttcagtgtccagctgtgtccacttcacaccatctcgtggacacatcccaccctttgggcagtgctgctgtgcagacttatagccagggcagccaggagagagcatccccaggggaaagccattctcggttcccaagaggcaactcctccaagtcactgtcaacttcccagggggctggctagcatgtaagggggaacctatttaacaaaaaggtgtgtctcatctgctgtctgtccccactgtcagggtctctgtcccttgcagcaggctggggctaggccaggcaggacacgggcatgcaggacatagtttgagaggcttcccgacaggtatggggcagaagaggccctgtgtctccccttcaatcctgctcttaaccaagggtactaaacacaggcagacacttgagaagggactaaggatctagcagggagagagaaaaatggggggcaggatggggtgtgggaagatctgtctgtatccatccacctcatcctcttctttaaaaatagaacactggctgggcgtggtggctcacgcctgtaatcccagcactttgggaggccaaggcgggtggatcacctgatgtcagaagtttgaaaccagcctgaccaacatagtgaaaccctgtctctactaaaaatacaaaaactagccaggcgtggtggtgcatgtctgtaatcccagctacacaggaggctaaggcagaagaatcacttgaacccaggaggcggaggttgcagtgagccaagactgagccactgcactccagcctgggtgacagagtaagactccgtctcaaacaaaacaaaagaaaacaaaaaatagaacactggggcagggtgcagtggctcacacctgtaatcccagaactttgggaggccgtggtggatggatcacttgaagccaggagcttgagagcagcctggccaacatggtaaaaccccatctctactaaataaacaaaaattagccaggcgtggtggggcgcaccggtaatcccagctactcgggaggctgaggcccaagaatcgctagaacccaggaggcagaggttgcagtgagccgagatcgcaccgctgtactccagaagtagacaattcatacattttaagttgtgtgctgttgtgagtagcctgatgaaatctcatgctgtatggggcgtgtccatgctgtatttgctccctgtctgttagtcactagtggtcatctcagttatccatcaactgtcacggtttcacagtgcttatgttcaagtagcccttagtttatgtaacaatattttactactaaaaattattattgttgttgttagtctctcactgtgcctaacgtattttattattattatgttttgagacagggtcccgctctgtcaccgaggctggagtgcagtggtacaatcttggctcactgcagcctcggcctcccaggctcaagtgatcctccagcctctgcctcccaaggagctgggactacaggtatgtgccaccatgccctgctaattttttgtatttttagtagagatggggttttgccgtgttgcctaggctggtctcaaactcctgggttcaaacaatctacccgtctcgacctcccaaagtgctgggattacaatcatgagccatcacacccagcctattttattttattattttttagacagggtcttactctattgcccaggacggagagcagcggtgtgatcatggctcattgtagtctcgacttcccgaagtgctgggattacaggcatgagccaccgcatctagctgtgcctaatttgtaaattaaactttattataattagagctgtataggagaaaacatggtatatacaaggttcagtagctctctgcagtttaggcatccactggggttcttggagcgtttccccagtgggtaagtggggattactgtacccaaaagaatttaaaacaagtgtttaagcaaatcgttgtacacgcacgttcacagctgcattattcacaatcaccacaaacgtggaggcagcccaaacatccaccaacaaatgaacagctaggctgggcgcagtggctcatggctataatcccagcactttgggaggccaagactggcagatcaattgaggtcagaagtttgagaccagcctggccaacatggtgaaacgtcgtctttactaaaaatacaaaaattagccgggcgtggtggtgcatgcttgtagtcccagccacttgcgaggctgaagcaggaggactgtttgaaccggaaagcggaggttgcagtgagccgagatcatgccactgcactccagcctgggggagagcaagactccgtctcaaaaaaaaaaaaaaaaaaaaaaaaagagtctccaggcttggttgtggagcagtgggggttggggactcagcggagaggaagcaggactaaggccccctacaagtccttctggatgtgactccagaggcctcatcacactccctcagccccggtaactattctgcacagcattccccacggacatgggaactgggccagatgctgtactaggtgctagagagataatggagaagaatgcagtcccccaaagctggtgttgaatgaagtcagcagggagaatttggagaggtgggaggaagggggctcccagggagggggcccacagcctaagcaaaggctagagcctggactgggaatgcctatgcagggcaccctcggcaggggtgtcaggggacaggaagcggggaagagaggcaagattgctggaggggaatggcagtttgagagagaggcagagaggaggagatgatgaggtgcctccagcccagcccagcccagctatctcagccacctgaacactgtcatcccctgcccaaacctctcctgctctcctggggctctcagtgacccgctcctcccctggtaacacacattttttttttttttttttgagacagagtctcactctgtcacctaggctggagtgcagtggtgttatcttggttcactgcaacctctgcctccaaggttcaagcgattctcctgcctcagcctcccaagtatctgggactacaggctcacaccaccgtatcaggctaatttttgtatttttggtagagacagggtttcaccatgttggccaggttggtctcgaactcctgacctcaagtgatccacccgccatggcctcccaaagtgctgggattacaggcgtgaaacactgcacctggtctgtttttttttttttttttttttagagacagggtcttgctcagtcacccaggctggagtgcagtggtgggatcatagctcattgaagcctcaaactcccgggcccaagtgatcctcctgcatcggtcatctgagtagctgggaccacaggcacacaccatgactggctaatttattttttagtttctagtagagacagggtcttgctatgttgcccagtctggtctcgaactcctgacctaaagcgatccccctgcctcagcctcccaaagttctgtgattacaggcgtgagccaccgcgtccagcctgggtgtaatttgaaggaaaggctgatcagctctacatggactgactgtgggtgtgagagaggcttgtgcagatttgcacacgtggtgcctcagcctggggcaacccctccacgctcacacaatcacaaacaactcaaagaaatacaaatacactctcagtcaaccacacacaaaccctcatccacatacacacatctgcccacagacacagttaaatacacaaagacacagccacacccacccacccccacacacgtgcacccatccacctcaccactcacagatatgaaaacacacacctcagtcagccacacccgctcacacacatgctcacacccacacccgctcacgtacacttaaacacacccaaatacactcatataaccacatattcacccacaaacacccacattcacacacacatccacccacccagatacacactccaatacacactcatacagacacactcagacacactcaaagacatgtttagtcacacacatctgcacacacctacacctgttcacatacacttagacacacagacacacttagtcacaatcacacacatttagtcacacactcaaaaatgcacacatactcacactcaaatacacacacaggccaggcgcagtggctcacgcctgtaatcccagcacttaagggggccaaggcaggcaggtgaatcacctgaggtcaggagttcaagaccaacctggccaacatggtaaaaccctgtctgtacaaaaatacaaaaataagctgggcatgatggtgcgtacctgtaatcccagctactcgggaggctgaggcgggagaattgcttgaaccctggaggtggaggttgcaatgagctgagatcacaccactgcactgcagcctgggcgacagagcaagattctgtctcaaaaataaacaaaacaggccgggcgcagtggcttacacctgtagtcccagcactttgggaggccaagtgggcggatcatgaggtcaagagatcgagaccatcctggccaagatggtgacaccccgtctctattaaaaatacaaaaaaattagcttggcgtggtggtgcgcgcctgtagtcctagctactcgggaggctgaggcaggagaatcgcttgaacccaggaagcggaggtggcagtgagccaagatcgcaccactgcactccagcctgggtgacagactgagactctgtctcaaaaattaaataactaaataaaataaaacaaatacaccgtcatactcatagatgcatgcaatcacacagacacactccaagttacagtcttgcatgctcaagcattcaccccacacacaatcactcacacaggcctgtgcttctatcatctgtgctcaggtgtctcctccttggagtagcctgatgagctctcaaatctgggatgggtgggtgcggtggctcatgcctgtcatcccagcgctttgagaggccgaggcaggaggattgcttgaggccaggagtttaagaccagcctgggcaacatagcaagaccctgcctctacaaaaaataaaataaaattagccaggcatggtggcaggcgcctgtagtcccagctactcaggaggctgaggcagggggattgcttgaacctgagaggtcacagctgcagtgagctgtgattgtgccactgtgctccagcctaggcaacagtgagaccctatcttcaaaaaaaaaaaaagagtctgggatgaagggaaaagtcctcccatgacaccttcgctctgtcctgctgttctttatattttacaagctccaaactgccctggctaaggctgggtgtgatggctcatctcatgcctgtaatgccagcactttgggaggtcgaggtgggcagatcacctgaggtcaggagttcgagacctgcctggccaattacaaaaccctgtctctactaaaaatacaaaaaaattagtcaggcgtggtggcgtgcgcctataatccccagctacttgggaggctgaggcagaagaatcgcctaaacccaggaggtggaggttgcagtgagctgagatgccaccacgctccagcctggtaacagagtaagactccatctcaaaaacaaacaaacaaactgccctggctaatcttgggatggaagttatggaagcaagaggctggtggggggagggacttcccagtgtatgtatgggtataggcctctgtcgggggcacaggctggctgtggggagatgtactgggtcttattctcgtctgcatggggcccagcacctattaagtgctcagtaaacatgtgttgaatgcataaaaaaaagatgtaaggtgaacgggtgtgctggcaggtgtgcagtgcttttaggcgggcacttcatccaggaactgccacgagagcccactcacctctgtgacatgatcttgaaggcgtccggcaggtagcactgcacattctccatctggaaagggtcagcatcgcaaatcttgtcgtccgtgcgcccgtagttggcattctccaccatgatgacgtcgctgccggggcaccgcagctcgatggggtagccttcacacgccagctcccggcgcatcagcccgaacgggagcccggcccggctcaggcctgcagggagggttggggatggtgtcactcctgggcctgggccaggaagggaagaccctacccactgccaagaaaacaccacctctggctcggctgtgtcctggaagccagctgaggcagcctcagttgattcagctgtagaatgggcctctcagtgtgcccacttgtgtagtgaggacattaacctggcccagagagtgcctggactctcagctcctaggaagtgacgtctgagcctttggaatgctctgcttgataagagtgactgttttcctggggtcctcgggctacaccagatatgctgttatggattgaactgtgttcccctgaaaattcatatgctgaagtcctaacccccaggacctgaaaatgtgacattatttggagataaggtctttatagagataaattcaaatgaggctattagggtaggccccaatccaatatgactgtggtccttataaaaacgggcaattttggccaggcacagaggcacacacttgtaaccccagcattttgggagacagaggtgggcaaatcgcctgaacccaggagtttgagaccagcctgagcaatatagtgaaaccctgtctctaccaaaaatacacaaattagccagacgtggtggcacacacctgtagtcccagctactggggaggctgaggtgggaggatcacctcagcccaggaggttgaggctccagtaagccatgattgtgccattgcactctagcctgggcaacagagcgagaccctatctcaataaaaaaagagggggtggggcgttgttgttaagataggatcttcctctgtcacccaggctggagtgcagtggtgcgatcatggctcactgcaagtctcaacctcctgggctcaggtgatcctgcctcaacctcccaagtagctggaactacagattcacgccaccatgtccggctaattttttacattgtttcatagaaatgggtcccttttctatgttgcccaagctagtctggtctcaagcaatcctcctgccttggcctctcaaagtgctaggattatgggcctgagtcctcgcacctggctaaaaggagaaatttgggcacagaagtgtacagggggaagacaatgtgaagacacaggagcaggcggccatctatctataagccaaggagaggccaggcgcggtggctcacacctgtaatccccgcactttgggaggctgaggcgggtggatcacctgaggtcaggagtttgagaccagcctggccaacgtggtgaaaccccatctctactaaaaatacaaaaatcagctggacgtggtggcatgtgcctgtaatcccagcgacttgagaggctgaggcaggagaatcacttgagctggggaggcagagattgcagtgagcccagatcgtgccactgcactccagcctgggtgacagagtgacattccatctcaaaaataaataaaaaataaaaaaaaaataggtcaggcacggtggctcacgcctataatcccagcactttgagaggccagggtgggcagatcatgaggtgaggtgattgagaccatcctggctaaaacggtgaaaccccatctctaccaaaaatacaaaaaattagctgggcatggtggcgggcacctgtagtcccagctacttgggaggctgaggaaggagaatggcctgaacccaggaggcagggcttgcagtgagctgagattgcaccactgcactacagcctgggcgacagagcgagactccatcaaacaaacaaacaaataaatgccaaggagagaggcctcagaaggaaccaaccctggctgataccttgacctcagacttctggcctctgcaactgtgagacaatcaatgtctgttgcttaagacacatggtctaggccgggctcggtggctcacacctgtaatcccaggactttgggaggtcgaggtgggcgaatcacctgaggtcaggagtttgagaccagcctggccaacatggtgaaacccccatctctacttaaaaaactacaaaaattagccgggtgtggtggcaggcacctgtaatcccagctacttgggaggcgaggcaggacaattgcttgaacccaggaggcggaggttgcagtgatggcatgcagagatcatgccactgtactccagcctgggcgacaaacaaagacacatggtctctggtactttgttagggcggccctagttaatgaatatgctaacaggacttggggcaggagctttgggtcacatagtctcagctgacttctagagatgctagagattcagctcagccctgtaggtggtctatcagggctacagagtacagaactgagctccaatacaaaccctggataacaaggcttgggggagcctctatggttggcagtacaccatgtgtgttgtcacacattgttgccgggagagttaacactgtccaggactccactgaagggagtaactggaaactccatgcatggaactttcttggactctgccctatgcacctcttcccttgcctgacttctatttgttttgagacagagtctcgctctgtcacccaggctggagtggaatggcgcgatctcagctcactgcaacctctgcctcccaggttcaagcgattctcctgcctcagcctcccaagtagctgggattacaggcgcctgccaccacaccccactaatttttgtatttttagtagagacggggttttgccatgttggccaggctggtctcaaactcctgacctcaggtgatccgcccgcctgagcctcccaaagtgctgggattacaggcatgagccaccacgcctggcctgtttgttttttcagacagggtctcaccctgtcaccaaggttagagcacagtggtgtgatcatagctcactgcagcctcaaactcctgggctcaggggatcctcctgcctcagcctcccgagtagctgggactacaggcacataccaccatgcctggctaatttttttttattttttgtagtgatgggggtacttgctatgttgcccaggctggtctcaaactcttgagctcaagcaatcctcccaccttggcttcccaaagtgttgggattacaggagtgagccagtgcacctggccctgattttaatctgtatccttttgatgtaataaactgtgagcaaattagccgggcgtggtggcaggcacctatagtcccagctactcaggaggctgaggcaggagaatggtgtgaacctgggaggtagagcttgcagtgagccgagatcacaccactgcactccagcctgggcgacagagcgagactccatctcgaaaaaataaataaataaaaaataaataaactgtgagcataacatctagttagttccaagtccttctagtgaatgatcatacctgagtgttctctgggggacccccaaacttgtcattggtgtcagaagtgaggcttggcttggggacttccctaacttcaccccaccccatgcgaggagcagagaaaacatgggaatgaactcatgtttctagaagaaaccatagagactggctttgccgctgacagggcagatgtgaagtctggttcagaatgcagattcgggccccatactcggcctgctggatcaaaatcccaggggtgaggccaggagcctgcagggctatgtgccaaccaggtgatggtgatgcatgctcaagttcgaacagtggctgggcgcggtggttcacgcctgtaatcccagcactttggaaggccgaggtgggtggatcaccagaggtcaggaattcgagactagcctggccaacatggtgaaaccctgtctctactaaaaatacaaaaaattagccgggcatggtggcaggcggctgtaatcccagctactcgggaggctgaggcaggagaatcgcttgaacccgggaggcagaggttgcagtgagccgagatcacaccactgcactccagcctgggcgacaagagcaaaactccatctcaaaataaaaacatttaaaaagtttgaacagccaccgttcttctttccccaagcctcagtttcccaatctgtaaaatgagcacctacagccccgggtcatcctgcagggatcctgtgccttagaaaatgctcttgaaggaaagcactgagcatggcaccctgcacacggagggtgcctgatcagtatcatctggtgaacctccaaggatttcactgtgacaaggaagggacatgttctgagcaggctgagctccctggggggattgcgttgccccatgttggtcatcaccttgtaccacacggggatggagaactagaatgtaggagccagacagatggctggggttggaattccagcccggccactccctggctgcagcctcatccaagtcactgaccgcctctgtgcctctgtccctcccctgaggggcagagaggacaattcccatctcacaggactgttgtgatggctccagggtgttaatgtgtgcagagcgcagtgagatgatatgaatgctaattattgttattatgaatattattaaggcggtttgtctgcacaacagagggtgcctggcagggtccatgctggccggggcagcaccttctgtgacgctggttccagccaggccctgcggggtgctggagggcagcagggattcagccagggacccagatgccccaatgtggggaccgtcgcttgtaggtgaaggaagtgaccacctgctgtacgaggtttcgggagggcactcgtgcgggacggtgacagagctgagcctttccagagatctgggtgggtaccccaggggtatggcagggaggcccttggggttttttggggtgagttgagtcccagcggggggaacatttcacatgtgttcctccagcaccatctgcctcctcatctaattttagccttcccgggcttgggagggagggccgggggtggaaggctggctcagatgggtctgggggtggaggcagccctcccggcccagctggggctatggggcaggacctggatgggcagagaacgtagcagcagaggagtgaggttgctggccagcggggcagtgccaaggccctggggcccagctgaaccgtgtcccttcaacctttggagctttccagagggcagggccagagggagcagagtcacccgccaatgcccttcatacagggatgtcggggtgggcagggggcacatcccagagtgaggggccgggcctactggcctcttctcttggcctctcaccttatcccgcccttgcccccggcctgggctggtcacggggccagtaatcgagtaatcggtgagggtgggcgggcaggcttggggcactaatagtggcgtgtgcaggatcctagggccggcatagggccgagccgggtaattagttgtttttaaataaacgtcagcgggcatgctttaattaagccttcttcccagtgagagcctcgaagatgtaatcacagagagagagagagagagagagagcgagagagagacagagagaggagcatcggctcaccaagaaggcctgtcctggtcccaggggccacagcgggatggcccctaccaacctggcccagccgacttgttggaggtaagaggatggtccaggggcctcttggtggcactggggtgtgtgttacccctgagtcttccactggcctgctccagctgaggtctggggcggggcagggggctgtaattctttactgagtgatcaggagggttttcaacattttatctgccccccccagaagggtttgggagccgcggcccctccccggccccagcagcacctaccttgggtggccgaggtgaccaggacggcggtgacacacagattccagagcactgcggctaggcgggccatggtggcagccgggtgcgtgtccggagctctcagtggcctgtgcggggggctttgccccacatcacctggcaggcaccacggcctggaccaccagcctgggggaggacagggagactgaggtggggatagggcctccaggccgctcccctctcctcctgctggtggctgagtagctctgagaggctgaggtccagcacgtccctcgagccagccctatctgtagggccccctccggggtctgcagctcacaccacaccccccacccttacacccagcagccagacccagctatctgggcacctctgggcaaagagactgccaactcttccccactggaacctcctgggacagctcacggggagatcccaggcaggccttggaccctctggaagcctcttccccatgcccctgtcctgaccctgcccactcatctcccctactcgcatcctcaccatgagcaaggaggtaatgagtgtcctcccaagtgagggactcattgcaacccaacttgcagcctccccgtcttgggcagaaatccaagcccccgcccccagccccctgcttcctgtctctcaagctctggtggctaattagaatccagctggcgccacagatcgggaaccagggacgcccgagtcccctctttcctctctgggggaccttcagggtaagctggagacaggcaggcggggtgggaggcggacactgcctccccctctgggggggccaggggagatgggggaggggtgagaattgtgtgctgtcccctgccatcctccccacctgctctgtccccaggcacagcggctcagttttttttttcattattattatttttttaaattttagaaaccaggtctcactctgttgcccaggctggagtgcaatgatataatcacagctcactgcagcctcaacctcccagactcaaggaatcctcccacctcagcctcccaagtagctgaaatcacaggcttgcaccactaccaccagctaatttttattttatttatttatttatttatttatttatttatttatttatttttttttctgagacggagtcgtgctctgtcccccaggctggagtgcagtggcacagactcagctcactgcaagctccgcctcctgggttcacgccattctcctgcctcagcctcccgagtagctgggactacaggcacccaccaacacgcccggctaattttttgtatttttagtcgagatggggtttcaccgtgttagccaggatggtctctatctcctgacctcgtgatccgcccgtctcggcctcccaaagtgctgggattacaggcgtgagccacagcgcccagcaccaccagctaatttttaaatttgctgcagagaggaggtcttgctatgttgcccagactgatctcaaactcctgggcttaagggatcttcctgcctgggccccccaaaactttgggattacaggagtgagccactgtgcccagtccaggactcggttctaactggtttcttcctgccttatggctgctccttctcacctctctccccgcctcagtctccccaaatcctctcaggcttgcacgctcaaatgtctgtcctcagctctttgctttatctacaccctggttctccaggtgtggtcccagcacactggcatcagccttgccaggaacttggtagaaacacacattctctctctctctttctttttttaagagacagggtcttgctctgttgcccaggctggagtacagtggcacaatgacggctcactgcaacctccagatcctgggttcaagtgatgctcctacttcagcctttcgagtagctgggaccacaggctctcgccaccacgcccagctaattttaaaatgtcttatagagacaggatcttgctatgttgcccaagctggtcttgaactcctggcctcaaatgatcctcccacctcagtctcccaaagtgctgggattacaggcgtgagccactgtgctggccagaaacacacattctctgaggcaggccctgaagcgtgggaacccctgctctgtcatatccagctgtcatcccagcctgtcccatctcaggctgtcctgggctctcagtaccatcattgagccagcactttcaaatctcttatgtccagcctggaatctctcatcagagcccccactaccatttccctgctgaaaaccaaaacccttgtaattggcccagttagctccctgaccccatttctgctccagccactcctgctattcctggaccacagcaggccttgccccagggcctttgcacctgttgcttcctccacctgtagcttctgccaacccactgtccacatggctggctccttcaggcctctgctcagatagaactattcacctggtgtatagaatgtcctcttcatggggcagggatcattgaactgttttgctcatggtggccgtatccccaacttttatttacttttatttttttagagatagggtcttgctctgtcactcaggctggagtgcagtggtgaaatcatggctcactgcagcctccacctcccaggctcaagtgatcctcccgcctcggcctccctagtagctgagaccacaggtatgcaccatcacatccagctaatttattttattttgcaaagatgaggtcttgctatgttgcccaggctgaacatgaacttctggcctcaagagatcctcctgcctcaacatcccaaagtgctgggattactgcgtgaggccatcaccactgttgtcttcatatcctcaacttttagaataggcctggcacgtggcaatgaattaattatttgttgaatgaatctcagatcccaaagctgagactctgccttgattcctcaccttccctgtcatccccctcacggaagccatcagcaactcctgtgggctctgcctctgaagtacctcgcgacctgcccacttctggctctaagcacagcacccaggcccatgcaccatcctatgtcacctgtatgttgtcctggcctccttgcccgcctcccaatccgcccttcactcagagctaagggaccacatgatgatgttgatccgaacattaactgaccccctggtctctgctggggtctcagttcctcactagagcccagaggctgtgggtgaactggtgccaccaagctctccaagccccattctgtcctccctcctgttcctgaaacattcaacattccagttccagtccccaagcaggatccctgcatgtcggctgcggctgctcattgttcagggctcagccgcaaggtcaccccagcagagtgacctaccctgaccccctgcaaacaaaacagtcctcgcctgctgccctcacccgccatccttttccctgtttttaattcacagctctcaagtgagcacctgaaattacctttttatcaacacgagcttcttgagagaggcccttacaaatcagcacacggctgggcacggtggcccgtgcctgtaatcccagcactttgggaagccgaggcgggtggatcaccagaggtgggagttcgagaccagcctggccaacatggtgaaaccccatctctactaaaaataccaaaaaattagccgggcgtggtggcgggtgcctgtaatcccagctactcgggaggctgaggcacgagaactggttgaacctgagaggtagaggttgcagtgagctgagattgtgccattgcactccagcctgggcaacagagccagactgtctcaaaaataaataaataaaacaaatcggcacaggccctcaataaataaagatccccacagggcaggacacctggtccagaccccagtctcctcacgtgggaaatgggaagataatatctgcaagacagccctgaacaccccctctccagccctgtagctctctgcccgcttcccctctcatgcccactcccgataccagctccctctccactgccccagcttcttcagtaaatcccccccagctacctccagcccccaaccgcgtctccccccacatccctgactagacacggccagtgtcactttcagatgattttacagcgtgttaccccgccgccgccaccagcccctatccgcatctcccccacatctgtgactagacatggccggtgtcactttcaaatcattttccagcatgttaccttgggaatggggagtggcttccttatttcaacttcctcatttctcccccaactgcccagccacagaaaggttcaggggaggcagtgtccccaagctgaggatactcccctcccagggtctccaagcgctttctttcccactgcaacaggcatccgagcagaggaactggttagagggagtaaaaatggctggcttggtacggtgactcgtgcctgtgatcccagtgctttgggaggctaaggtgggtggatcacttgagcccaggagtttgcaaggctgcagtaagctatgatcctgccactgcactccagtctgggcaacagagcaagaccctctcttaataaaaataaataaataaataaatggcagggaagccactcgatgccaaattgtgtgggcagcgaatccacatgggtctagatcccaattttgccttatacatgccctgtgtgaccttgagctggtctcctcacctccctggccctggttccctctgcgctgctattctgcagggttctggtaaggagagcagtacacgtacacgctgggccaatacaggccccatcagagggtgctgtgcacagcctggtgccagtcagggcacaaagacacccacggaagaggcagtccctctcttcctcccaggctgcaccctagaatgctaagactccagagtggaccccccagagccatgtatacttccaccgggaactccaaggcaccttcagcccaaccagaccaaaataagcccctacatcagtgcacggtgccaccatcctcccaggccctccagccagaaccccaggagctgaaacccttgactcctctctcacccctaaatccagttcaagagtaagtctttgggctgtgtatacttccagaacaccccagtgttggtccacacatctgtcttcagcatctgcccctctagtcctgggccctggccactccccaagtgccctctggctcctttgcctccgacgtccaggctctcctggcagccagaggcaccacctccttttttttctttttttgagacggagtctcactttgtcaccggggctggagtgcagtggcacaatcttggctcactgcaacttccacctcccgggttcaagtgattctcctgcctcagcctcctgagtagctgggattataggcgcccaccaccacgagcagacacggggtttcaccatgttggccaggctagtctggaactcctgacctcaagtgatccacccgcctcggcctcccaacgtgttgggattacaggcatgagccatcgtgcccagcctccaaaacttttttatcaccccacatagaaactccgtacccactaaacaataatgcccactccccttgtcgcccagccctggtaacttataatctactttctgtctccatggatttacctattctagacatttcatacaaatggagtcacaggctatgtggcctttttttttttttttttcccagttagatgggggtctcactctgttgcccaggctggagtgccgtggcccaatctcggctcactgtaacctccacctcccaggctcaagtgattctcccatctcagcctcctgagtagctgggactatagtcacatgactcctctaaatgaactcctggctaacttttgtattttttgtagaggcaggatttcgtcatgttgcctaggctggcctcaaactcctggactcaagtgatctgcccatcttggcctcgtaaagtgctgggattacggctgtgagccaccattcctggccttattttgtgtccagcttctctcactcagcgccacgtttccaaggctcacctacgttctagcctggatccgagcttcattccgttttatggctgcgtagtattccactgcatgggtggagcacgttttctttatccagtcatcggtaatggacatgcgggctgttgcacagaaggatcctttttattttctccctagctttgctgaggcatcattgacaaatagaaattacatctatttaaggttacatgatattttgatatccattatgtgttgtgaagtgattaccacaaccaagctaacaacacatccaacacctcacctagacacctttctggtgtgtgtggtgagaacacttgagtctaattcctcagcaagtttcaagaaaacagtatgctataataattattattattttgagacggagtctcgctctgtcacccatgctggagtgcagtggcgcaatcttggctcactgcaacttctccctcccagttcaagcaattctcgtgcctcagcctcctaagtggccggggctacgggtgggcaccaccgtgcctggttaatttttgtatttttagtagagatggagtctcatgttgcccaggctggtctcaaactcttgagctcaagcaatctgcctgcctcggcctcccaaagtgctgcgattataggtatgagccgccacacctggcctgctattattaattatagtcaccatgctgtaccttaggtctctggaacttttttcttttagagatgaggtcttgctctgttgcccaggctggagtgcagtggcaccatcaaagctcactgtagcctcgaactcctgggctcaagagatcctcccacctcagccttccgtgtagctggaattacaggtgtgtgccaccatgcttggctgattttaaatttttttgtggagacagggtcttgctatgttgttcaggctggccttgcactcctggcgtcaagcgatgctcccgccttggcctcccaaagtgctgggattacaggcacaagccattctgcctggttaaaacgtgtttatctgaaagctgaaagcttgtaccctttgacctacatcccccgccttcccctgtgccctcaccaccataaccactgctctactctgcttctacgagttcaattcttttttagattccacagataagtgaggtcatgcactatttgtctttctgtgtctggcttatttcacttagcataatgtcctccaggttcatccattccagaggggtgttttaaaagacaatcttggccgggcgcagtggctcacgcctgtaatcccagcactttgggaggccgaggagggcagatcacctgaggtcaggagttcaagaccagcctggccaacatggtgaaaccccatctctattaaaaatacaaaaattagccaggtgtgatggcggggacctgtaatctcagctactcgggaggctgaggtaggagaattgcttgaacctgggaggcagaggttgcggtgagccaagatcacgccaccgactctagcctggccgacagagcaagactccgtctcaaaacaaaaacaaaaacaaaagacaatgttgagtggtgggtcttctgctttaacccctccaacacctctgactcccgccttgtctccctccagccatgcgggttcccaccctccagcctcagcctgtccccatctgtgtccctcagactcagaggtgtcctccccagagacgcagacatgggcctctgccaccctgtattacagtgccctgcagtcaccgcctgcctgtgcatcccttgccatgctgtgacctcttgtgtctctgttttcttcttggtaaaacggggatacctcagagggcagctgtgcaacaggacaaattcacacacgagacactcgggatgctcctggcacacagacagggtgaagcatcccttgtccccattgtcaccttctctattagctcgggctgccataacaaagtgccatagactgcgcggcttacacagcagaaatttacttcctcctagttctggaggccagaaggccaagatcaaggtgccagcgaattcagtttctgtggaaattctcttccgccttctcactatatcctcacagggcctcttctctagacatgcataaagggagacagatccctgctgtctctctctttttttttttttttctgagacaaggtctggctctcttgctcaggctggagtgcagtggcacaatcccggctcattgcagtctcaacctcccaggctcatgggatcctcccgcctcagcctcctgagtagctggggctacaggtgcgtgctcctgtgcccagctactttttcgattttttttgtagagatggggtctcgctatgtcgcccaggctggtcttgagctcctggcctcaagcgatcttcctgccttggcctcccaaagtgctgggattacaggcatgagccacaagcgccggcctctctcttcttattgggataccagtcctctgagagtagggggccccacccttaagatctcatttaaccttaactacctccctcaagggcctacctccaaatacactcacgctgggagtcagggcttcaacctctgcatttgggagggaggtgggaagatacaatttagtccataacctcatccatcccatccctgctccatacttttacttgaccactcctagagttcctttattttattttatttatttatttattttttgagacggagtttcactctgtcgctcaggctggagtgcagtggcgcgatctcggctcactgcaacctccacctcccaggttcaagcaattctcctgcctcagcctcctgagtagctaggattacagtcacacgccaccacgcctgcctaatttttgtatttttagtagagatgacgttttgccatgttggtcaggctggtcttgaactcccaacctcaggtgatccacctgccttggtctcccaaagtgttgggattacaggcgtgagccactgctcccggccttttctttgttttgttttgagacggagtcttgctctgtcgcccaggctggaatgcattggcgtgatcttggctcactgcaacctccgcctcaagtgattcaagaacctcgagtgattctcctgcctcagcctcctgagtagctgagattacagtcacaggccaccacacctggctaattttcgtatttttagtagagacggggtttcgccatattggtcaggctgctctcgaactcccaacctcagatgatccacgcgcctcggcctcccaaagtgctgagattacaggcgtgagccaccgtgcccagccttctagattttctttctactcccagaagaatggaaactcctgaggctggaacttggtttccccgactcctgtctcctggttccctgaacacacagtgggtccccaagcaaaaacttactgaagacaggggagtgactaaggacggcagtgaggatagctggagatggggcgtctgccctgtgacctgggggaccacgcctgacccccacaggcagggtgccattgccttaggggtacagacagagttccccaggagcacgacgccctctccccagagtggctcccctaggaagctccagacacccccaggaaccagcctcagcttggcaggtggtgggtgtcccccgggagacccaggcctgaccatccctgaggcctctggagggggaggattgaaatatggccccccgcccccaccgccaaaaaaaaaaaaaaaaaaaaaactcaggctgggcacagtgcacagtggctcacacctacaaccccagtactttgggaggccaaggtgggaggatcacttgagccctggagtttgagaccagcctgagcaacatagtgagaccccatctccacaaaaaacacaaaaattagccgagcacggtggcacgtgcctatagtcccagctactgggaaggctgaagggggagggttgcttgagcccaggaggttgaggctgcagtgagctctgattgcaccattgcattctagcctgggcaagagagtgggaccccatgtcaaaaatacaaaagatatgttgaagtcccaactcctgataactcaaatgtgactgtgttgggaacatctggagtccttacagagataatcaagttaaaatgaggtcattagtgtgggtcctaatccaacaactgacgcccttatacaaaggagaaacctggacacagacatgcacagaagaccatgtgaccatgaaggcagagatcagagtgatgcttctagaagccagggaagattgccagttaatgaccaaaagaagccaggagacaggcctgcaacggattctgcctgaaggctcccagaaggaaccaaccctgacaacaccttgatcttggacttccaacctccagagctgggaggcgacacaattctgttgttggctgcagtggctcacgcctgtaatcccagcactttgggaggccaaggcgggagaattgcttgagcccaggagtttgagaccagcctgggcaacacagtgagaccccagctctacaaacaaatataaaaaagtagctgggcatgatgggatgcacctgtagtcccagctgctcgggaggctgaggctgcagtgacctgtgatcgcaccagtacacttcagcctgggcaatagagcaagacctcatctctgaaacataaacaaaaaaaccaataaagtctctgttgctaaagctgtcccgtctgtggtaatttgttgtgggagcctaggaaattcatatagggagtcaggacacaaagagagtgaggagggaggcagagatgggggcaagggcctgagccacagaactttaaagaaaccatttacaggaaacagcaaacgacagggtgagcatctagctgggctctccagcaaggaaccacctgagatgcctgggacagtgacggacagctccaagtgccagcccgagcagcttccacgtgtaactcatgtaatcctaataaccatttaggaaggagagatgcttgtacccacagtttacagaggaggaaagtgaggtcctgtcattgaagagatatacccagggacactcaactggtaagggggcttgaacccagggagggctggctccccaggttgggcttggtgagctgtggggggatcctggggggccagaagagcccccacccccgggcccacactgtatttgagtgtctatgcaacctcagagctggtcacgcctggacgttctacacctgggaagccaggtgagcccacacctgtgtccgtccccaccttgcacctcagtagtctctggtcaccttatttgtctttcttttttctttccttctttcttctcttttttttttttttcctttgagacagcaggatcttgctgtgtcgcccaggctggagtgcaatggtgcactctcagctcactgcagcctcatcctcccaggctcaagtgatcctcccagctcagcctcccgagtagctgggactacaggcacacaaaaccatgcccggctaatttttgtgttttttgtagagatgaggtttcaccatgttgcccaggctggtcttgaattcctgggctcaagcgatcctcccgcctcagcctcccaaagtgctgggattacaggtgtacccaggaatccattgcacccagccataggcgaccctatctcacccatgggaaacggggctgcacacctgcctgtatgttcgcatctaagccctgcgtctgtctcaagtcaagggtcggtgcggcagggtgggccactgaggcccagactctgtcctcgggtgccctgtgatggggatggggagagcaacaggaggagaagcggctgctgggggagagggggcgcctctagcctgccctagcctgcagttgccatggcaaccctctgcgtgctcgagtgggtgggagtctgagtgccttgggtggggggtgggggaaccaaggtggggatctgggatctgggcccccttcatggtctcctcccttcctggcagcagccggcccctccacacacagccctctggctgcatctcctgcctcctgcccactccccaaacccagccgcccatgagcccgcctccttcaggaagccctcaggcatccggcaggtccataaggaagccgcaggccctggggtgactatgaaggatcagctgagagttgaagcccctgaatttcaatctgctgtgtagcttcagagcaagcacttggcctctctgaacctatttccccattgctgctcagggactaacagacctacctcgcagagacagagcacgtgcccagagagggcccaggtacatgatcctcgggcagggcagggttctcacagcatctccagtccctgccccatcctccagctcagtggatggcagcccagtccctccaggggctcaggaaccggacagtcatcctggatccctctcccctcacatcacatccagccccgtcaggtcctgtggctactccttcagagtccactcacctctcgccactcctcagcttctctggtccagccccatcatctcctggctggaccccacttccccacctcactgtctacacctcgtctccctatctatctgccacccctgtcccatccaatctctacctcgaggcgagaacaatctttgcaaaatgaaactgtctacagtatgtttcccccagggccaccagagggcgcgtgtgagcatctaagtcagccgcttccctcctctgctcagaaccctccgtggctcccacctcactcgaccaaaagccaaagtctgtatcatacaaaggctctgcactgggccggatgtggcggcgcacacctgtaatcccagcacttcaggaggctgaagagggctgattgcttgggctcagaagttccagaccagcctggggaacatagtgaaaccttgtctctgccaaaaatacaaaaagttagccaggcatagtggcacacgcctgtgatcccagctcctcgggaggcttaggtgggaggatctcttgagcccgggtggtggaggttgcagtgagctgagattatgccactgcactctagcttgggcaacagagcaagaccccatctcaaaaacaaaaaacaaacaagccctgtacaatgtgaaacaccaggcactgttctgccttagggcctcttcacgggctgtttctctcttccccagatcccctcacagctcctcctgcatcttccttttggtctttcctcaaacatcactagttcagcaaggtcctgctggcccccacactcctacaccatgtcctgacttgatttctccatacctatcaccagcacgccatgcattttatttgcttatgaactctctgctactagatgctggctctgcagggtggggtttgcatactacactcagcacagcgcctggcacaagcaggaagctgaaatataattgttcaacgaagaaccttttaaaggtcaccctggagctgggcacagtggctcatgcctgtaatcctagcactttgggagaccaatgcagaattgcttgtgtccaggagtttgagaccagcctgggcaacacagtgagatcctgtctctacaaaaatttaaaaattagccaggcatggtggcacacacctgtggtcctggctactcgggaggctgaggcagcagggtcattcaagcccaaaaagtcaaggctgcagtgagctatgatcatgccactgcactccagcctgggtgacaaaacaagactccgtctctaaataaaataaaataaaggtcaccccggccaccaagcagcactggactgcagaggggtaggggtcgttcaaaaaattccctgcccccgcccccaacaccttctccctcatctccccatctatctgccaccccgtcccatccagtctctaccctgaggtcagaacgatctttgcaaaatggaaatccaattacacccctccctgcctacaaccctccatggctccctattgcctgtgatgctctaacatggcatctcaggccctgctgtcctgccaccttcccatcacttctactcagcgtctgtctctctctcacacacagttccttattctgctctccctccaaagggctctgcccagaggacagcattcgtatctctcatatccactctcacagcacacagggtctctgtgttttgctcccctaactggacttgggctcagctgttaaatgtctgtcttccccaccatcgagggactctgacgggaaagtaccattgtgggttgggctggctcttgttgcatacccaaccctgggcaaggagtggatgcttattcatttgtttaatgaatgaagatgaaatagacccaaaaagcagatcatctattcagtggatgtttaccgagttcccaactggtcacaagtgcaatggaggaaggtgtgcttgacagggggtatacatgtaggtgcaactgtagacagggtggccaggaaatgcctcccctaaaaagtgacatttcggcagaggtcttgaggaggtgagccatctaggtacctgtgcaaagagcattctgggcagaggaaacagcacgtgcaaaggtcctggggtaggaatgtgctgagatgtggctggggccctgcaagcaaggggaagagtggaaggaggtgagggcggctggggaggggggtcacagaggccatacagggccttgtggacctcagggaggactttggctttctagagaggtgggagccatcgggaatcctgaacagagggatgggatctggctcgggtgttcacaggtgtcctctggccgcagaggtggagatcagactgtgtgtggggagggttgctgggagtggagggtactctctaccccacctgtcccttgccttttgtccacagggctgtcaaagccagaaacctgaagcttccaccaagcactggctgcttctggcccccaccttgctggttgcctcctggcctcccttctggcctcctggcctcccttcctgccaactatggctctctcccacgtagcagctagagggagctcatgctaaacattctcaccctgccatctggatcctgacgcaaaccccctacctctacccccacccctgccacaggccctggcagccccacagtcacaagtccagccagcagcctccagcttctctccacatgcagttgtgaaacatttctccttcctcccctttgagccaccatcttctgtctgacctcagggcagcccctctctctcacagatgctccttcccctccaccatacccctcctccccctccaggttgcagctgggaagccccctcctccgggaagccttccctgacttgcaactctgttgcgctcaccatcatggcacgtccacaccacagtggcctgtggtctgtttccactccaaagtgttcactgtccagccccaacctttgcactctgagctcagcagagcagagctgaaaagagttctagaagctagggcccgagcagagggcacagaggcgggatccccctgcctcatcagatgctggcaggtaaggggcagggtaagaccaggagacaggggcatggtgcctagcagggcaggagagaagaggcctccggcatagcgcccttaagttgcaggttcaaatccaggctgtgcgccgtcatgtcagcacgacaggacacccacgtcactcctctcaattctgtctctccacgggggagctggggaacgagagcctcccagggtggctgtgggggttagaaataattttcggcaattccacacatcttttttggagcatcttctatgtgccagacactgaggggctgggtacaaaaaagtcgattctatagcgtaccagtgttgtgaaagaagataaagccaggaaaagtggctatgagtgtgtgtgggtttgggagtgtgtgtgtttttttttttaatcgtatttttagagacagggtcttactctgttgcccaggttggagtgcagtggtgggatcatagctcaccacagcctctgagctcaagggatcctcctgcctcagcctcccaagtagctgggaccacagggcgtgtgccaccgtgcccagctaatttttaatttttttgtagaaatgggggcctcgttatgtttcccaggctggtctcaaactcaagcgatcctcccgcctcatcctcccaaagtgctgggattacaggcacgagctactgtgcccggctgttgcaattttattttattttatttatttatttgagacagagtcttgctctgtcatccaggctggagtgcaatggcgtgatcttggctcactgcaacctctgcctcccaggttcaagcgattctcctgactcagactcctgattagctgggactacaggcactcaccaccacacccagctaatttttgtatttttagtagagacagggtttcaccatgttggtcaggctggtctcgatctcctgatctcaggtgatccacccacctcggccttccaaagtgctgggattacaggcatgagccactgtgcccggctgttgcaattttcaacaggatgatcaggaaaggccatctcccctggagaagatgacatttcagcaaacccctgtgaatttgagagaggagcacgcaggtgttcagttcaggagagttagaagagcatcctgggcagggtcacagcccgtgcaaaggccctggggctggaccgtgcctatatgtttgaataacggtggcagctgcatcgaggaagcgggttgtgagctggtgaggagagtgggaggaggtgagagcagggaggtgccgggaacagactgtgcaggactcgccttgtactttaaacacacaactgctccccaaatggggccgcccctctgcccagccttcactcccagaagccactagggggcgttctggggcagggtcggccaaccatggtcaggcccccgcctgcctttgtacagctggtgagctaagaatggtgtttacatttttaaaggactgaagagaagaagagaaaagagaacaggccacagaacccgtctgcggcccgcaaagcttgcaggatttaccatcgggctttctacagaaaagtcagccaacctctactctattttatttacgtatatatttttttgagacagggtcttgctctgttgcccaggctggaatgcagtggcgcgatcacagctcactgcagccttgacctcccagctcaagtgatcctcctgcctcagcctcccgggtagctgggacgacaggcgtgcggcaccatgcccaactaatttttaaattttgtattctgtaaagaagggggtctcgctttgtcgcccaggctggtcttgaactcctggactcaagtgatcctcctgcctcagcctcccaaagtgctgggattacaggcgtgggccactttttcccactggcaacctctactctacagccatcactgccaacccaggacaattctgcccctgatcccagtatgtttagcaatgtctggagactttctgaggtgttacgactgtggggctggaggtgtcactgacatccatcgggaagaggctagggtggcctctgagcatcctatagtacagaggacagcctcccacagagaatgatgcagtgccgaagtcaggagtaatggaaatcgtctaggaaatcctgtctgggaaagccagccccggacccctcacctcctcaagggataagaaggagaatccatctggcttcctgacctgatcatttgtgacctgcagggtatttttagcctctgagggaggggcactggctattctgagtttttttgttttttttttttggcggggtgggggggggcaaggttatttttggcctgggcatctatttattgaatttttatctccccccaaattttggaacaggagacagtgaaggcaggggcatttttttttttttttaagagtcaggatcctgcttcgtcgcccaggctggagtgcacttgtgcaatcatagctcactgcagcctcaaacctctgggctcaagccatcctcccacctcagcctcctgagcagctgagactacaggtacatattcacgatgcccaactattaaaaaaaaaattttagaaacgagtcttgctatgttgcccaggctgatctcaaattcttgtcctcaagcaatcctcccacctcggcttcccaacattctgggtttacaggtgtgagtcaccacacctgggtcaggtaagacttcttgaacgcacactgtgggccagtgatgactgttgacacctgggattcccaaagcaaagcaaatcacaacatcctcgcgcgcttggatcctcctcacagacacagacagtaaacaaacaagcgcagaacatcaggaaattacagactatgtgaaaagccgtccgctgtactgaacatcaggaggggtgtgggaagctgagactttgcagaaggtgcctgggagtaaacgttactggggaggtgatatttcaagagggtgggggagaaaaagcctcgaaaatatctggggaagggtcctccgtggcagaacagccagtgcaaacgccccggggtaggatcacacttagcacactggacgagcaacgaggagggaggagatggcccagaaagaccatgaagggccagaccccaggacagtccaagcctgtgggctactgcagtcagagtttggggctaccctcgaaaagaagacacacatgccttctccccaactcacatgacaggagagttttgcttttttgttttgggttttttttttttattgagaatgagtctcgctctgtcgcccacgctggagtgcagtggcacaatctcggctcgctgcaacctccgcctcctggattcaagcaatcctcccgcctcagcctccctggtagctgggactacaggtgcacaccaccacgcctggctaatttctgtacttgtagtagagatggggtttcaccatgttggccaggctggtctcgagcccctgacctcaggtgatccacccgcctcagcctcccaaagtgctgggattacaggtatgagccaccacgcccagctgataggagagctttgatggaaaccccatatgtgttgctagagtgtgagctccatgaggacaggacatggccaccaccccccatggcgccccctgcatggtgctgggtggggaggcaagtgtgtgcagattgcatgacaaggtgcacccagccttgctccaagaagtcctgagcacacaactgcaggtgcacaaaagatgcagacagccccatgtgtgcacacagacagctactccttcttgcagccctgcctcccccagcatgaccaccccctctgcaaaacacaaacaccagcacaggagggacctttatgaacaccggatgagtctgatggtcacgtggccacatgcacccttggctagatcaccatccaggccacacaggcagaggacacctatgcacaggtgcagacagacagacagacatctggattctggggacaccgggaccccctccatgtttctacttggcctcccacctcactccaggacccgtctctccccttccatcagggtgcccaatagcaaccactttgccccaaacccagcctgggaggagctgtctgtcttgccacggcaccttcagggtcactggggtcagggtttcagacccagggaacccccgcctcaggagcccctccccctgcctccccacagaggggctggaggaggggaagtgtctggcatctggaaatcagatccgtgagaggaacccacacagaaacgagagccttgtgtgtccttggccacatgtctcgccagggagaaaggagggggtggagggcaaagacgatgctctggcggggatggcagtgctcccactcctcccgttcctcttgaggggcacccactgccaccctccccaccgagatgcctgcgctggggctgaagcaacacatgctctgccaccagcctggcagggtagggaggacgcagacgccccgagatgcaagcgtcacacagcctcacatgcaggtggagaggccacccgccaggagcccaaactgctggatgcaaacacactcccgtgcagctgaggcgcctgtaggctcctccccaacgtgcccacagggtcctccaaggccccccaggagaaagggctcccctgggcaggctgggaatagaagctgggcttcgagtcccccccttccaccccctccctgcaggctccacagcccaggtgtgctggtccccagctccccatcctccccaagcctgggcgccagctacacccccaagagcaggaatcagcgtgggtgatcacggggtacgcaagcgcccagaagtggggattgagatgggcgccccttggagagaaagagggcctgcaggggtgtcccagagcagatgccacacacacatggggtggaccgagcggggccatgagggaggtcaccaagctgggtaggaagatggtggcaagaccagcaggagggccgggacccacatgtgagcgcacacgtatgtcgcacacgtatgtggctccgtgcacgggtgcgatcgctgccagccatggaattagttcccttttccgaattccagatgatttttcatctctgtaattaatgggcaagtcagttctgaacggcatggcagacaaattgctagttaggaaaatcacggataattttctcgatatgataatgaaggttgtaatccttctcttattctccctgttttcatcctacttttaagtaataaatttggcattagtgggaggggagcagggaggaaggagaagtcacctgccccccaaagctggggcctgacagggacccacgcagagtcccctgccgggggcagacaggagaagagaatgaggggtgtggaccctccgtggggttgatcaattcagggggccaggccctggagagcaggtggagggcacggagctttcaggctgtgagccagggtgaaggagtggggtctggggtcaggttagactcatgccagcccttggggtgttggagagagaagcagaaaccaatggtctgtccccaaacagcatggaggtcaacggcccggaatagacattcaccctcaggtgtgccccactggatccgacctcctctaagcagtgactccctaccaggataagggagccgggcaagcagagaggggaagagagaaagacagagagagatagagaaagacagagagagtgagagagagagagagagagagagagagacagacagagagagagagagcgcgcgagccagccatcttggcagccattttgaacccctccccctcctgcccccaggcacacatgttgggaagtgggatgtgggaagacagaccccagctctgagtccggtggaagccaggcggaagggggggccctgcctggaactgggatacagaaacacccacgcagctggcatggctgggggtggatgggggttggaacaggaagaaagggtccaggcaggtacagtgaggtgttggccagggatggggcagtgtgaggacccggactggaagtgtagagacaggggtgtgtgtagccagcggctgtcttcagatgggggccaggggtgcactggagagatacctgggagggcattttctggacacggctggagcaaacacagcatccccccaccccaccacttcaggcctggactcgggtcccaggaccgtcagatgggaggatgacaaccaaaccctcgcagctcaatccaatgcgcacctggggtgggggtggggagctgtcctcaaagcacgaataatccgagtggatcaaacctgccggcctcccgtgctttaacccggcaccacggagagaaggtgctgcccggctgcaccccctcctcctgacagcggcgccccccggactgcggccggctggacacccagacggacccctccccatcccccgcgccactgcctcccagagaaaaacaaccccctcgcccagcatcctgtggtgccagcccccgacacggctcctctggggcgcggggccggcgcgcggcgcgcacacgcaccccctccgctcacacccagacacctacacaaacagggcgccaagcacccgcgcgcacacgcaccggggacacgcaggcaccgccgcgccgcttccccacaaaggctggcgcgcgcgcgggcacacgcagccacgcgcgggcacactcgcggtcccctccccccgccaggcaccctgcggtagcccgtccgcacccccgcgccccgggcgctccgtgggggccgcccctcccaggcccctcgccagtgggggtgaggtgcgggctgcccccgacgcccctcccgctcaggtgcggtgccccgcgcggctcccgtgtcccctcccccctcgcggccaggacaggccccggcctcccatccttcccgcctcccctcttccacgcgccccgcacacctggcccaggtgcggcttcgcccctcgccctgggcccgcagacactcacctgtccagcgcctctctggggtcggcccagcgtgtctctcctgcggctcggcgaacccgggccccccgcccggcacatctcccggagccggggctggggggaagcgggtaggaggtggcgggacgagggcggcctccgtgtcccttccttcccctggcccagcaccgccgccgaccaaaaattaggaaaaaaaaaaaaaaagaaaagaaaagaaaaaaaagaggcggattacacggatccaaaggcggccccctcgcggcggcggaggctcgggactgggggcgatcgggtctgcgcccctcccggggagggaggcggtggggcgggggcggcgtcagagcgccgggggctggggcgaggcggagcgccccgaggcggcgccggcagcggcccgcatctcccccgcagctccgcggccccgacggaggcggcacgtgtgcgcccaggcgacttcccagccccctccgacgccggcggtggacgaggggttaacggggcagccggggcgcccctgcaggcccccgccgcccggcggcgccgctccggggcccgcgcggccccatcagccggggcctcctcggcagacggcggggcgggggcaccgcagcgccgacagctcccgcgccgacggctcgggctccccgcagtggccgcggggagctcgggttgggggcgggcggcgcggagctggcggaggggggcggcgcggctggaggcgggtgccgcggcgtcgcgcccccggtgcggccggagggggggcgccgggccgggcccgtgggcaccgcaggacgcgcggaccgagccggcgccgggcaccagcaatgacaagccgcctgctcgccccgctccccggcgcacccgctccgggaggggggcggtgggcgcgcgcaaaacccggcccggagtcgccgcccgggactggccgccgcaacccgcttgagcgccccaggagccggcccgaaaacccgggctggactttccttcctttcgcctcctctcgcctcctccctggaaaagcagggagagggaaagcgacgtgctggagccccgcgttggagcggggagtgggggaagggagacaggcgtaaggaagacccggagcggattttccagtgaagtataaggaaaggcgccgagcccggggaaggagggcgcaaatggggagatctggaagggttgtgcaaaacccgagttggattagataaagatgggaggaacggtgttggagcggggggttggggggtagatgcgacatggccaaatgcacccggggcacgcaaatttcgggccggattctttctcgggagacggagtaatgcgtcaggcctaacgcagtggaaacaagcaagacccggcccggaactcccgggacctgggttcgcatggtggggggttctggaagggggatgcttagtggctgaggcgacttgggctgccctcatcttcctggcagcgacgtgcaagggggacgggcaaaaggaggactggactcgggtacgaagggatttggcgcgctggctgcaccggagcggacaggtaaaagcggtttctggatccaggggcgctgcgaagggaatgcgatgaggccgctaccctgggagaccagacctacaataaaaggcgagggaggcacgcaaagccaggactggagcgcgggacgggatgagaccctcagcagaagatcctgggccaccgggacaggggcttggagctgaccgggcagcaggggcggagggaagcgttagggggaggtttgtacctgtaaacgcctcaaagtcttgcttttggggagggggtgcgaggggaaaaattgaattttatgttctctaaaagagtaaaaacccggcatggattttcaacacctaacaactccattgcagctggtggactctaagaagtagggcaagaagcaggcttgggttcccaggcatcagaccaagtgaggcgaggggcaggtttcgggttgaggctgcagagggagcccccgcaccccctctctggggtggggaaggctgttggacccggcttggctctctggagagcgaaagttatgactgccaagacctatagctggggctataaaactgggccccaagccaaaaataggcacttcggcagaacaggcaactttgtgcagggtgggggctggagggaaatggaagtgggaagaatcctggagtggagggaacaggggggagggggggagtccctgaagcggggctgctggctccattttatgaaagatgggaagactgatggctggggagggcttggaatcctcagggaagggaatccattcaagtgaggcccaaatgttaaagcagacagctcagagttcaaagttgggctgcatcttagcagcagggcagacaaaccctgatctgagttttagaggagggggacgggctgaggatggggatgggggaaacccccattccctatatgtccagggaagagagtgcattgctaaccatgcgctttgcagaatgaatgaggaaagggaaaagggttcctgagtaggagtggtaaatccacaaaacttgaggcatatctggatgggaaaaatgagtatctaagaaagcctgaattgaatatctgcacgggaattaacttggcctctaagaatcccttcctagaagcacgtccctgtggctaaactggaggaagtgcagggacaccagacttccaggctgcccgggtgaccacgcaccactgctgtggcagcctgtcaccctccaccgccttctacggacagctgtctcttcacgacggggaagggattcttgaaagccagaacctaggcaaatctggccccagagaacttcaaaatggagggatgggtcactttcgttcctccttcatgcccaggatttcatggctgcaaagctgtccagccttgaatctgggtggccaggttggacaccgggatctgggggaccaaatataaagtaggatttggtgagtgcaaaacggatcccatccatctgtggttgactgcagatccactgggtatggaggagggcatcccatctctctacgcctcaatttcccagtttgagatattgacagcaccaagtaagacccatgaaggctttgagatggagggcactccaggcagccagctttctataaacccagcagtaccgaaaagggaacagaacttgacgctcaggaaaagctggtcacctccttgttctcctgctccaggcctttgtccccaccccaccctccagccctgagcagcccacccacttccccctacagagctagcctaggaggtggttctaacttgcactctccagaggctacgagaaggagtggcctttacttacatgagggaaagcaacgacattctttaaggcaccctcagctcagtttggaaaaccccagccggaacccccctcacccccgcccctcgcccctttctagaccctctaaaccccactggtcccagctgggatcggctctccagcctccatctgatccatgtctcctggacttgtgagcggcgtgctcaggaggcaaagagtgcggaggggctggggggcgcgtaaagagccctggcgcccctcaggccttcggctgcgcagccgcagtggaggccgcgccagcaaccgggctccgggaaccaaggcgtccgcgcgcgcacgcagactcgcccgcgcgccgcgtgccccgcgctgcccaggtcggtacccgcgcttcggacaccctgctcccagggcgctcctcgcttccagcctcccactttgcgccttgggctccccatgagccccgctcctgagacaccccacgctctgtgtattccgtcccacgggacctccacgcccacggtgccacgcgcctcgagtaccccatgttctatgaaccctgcacctggacgccccatcttctgcgcaccctgtgctagagaacccgcacgcccagggtgccctatgcctagggcaccctgtgctctcctgcgtatctgggactccacattttgtacgcctagcacctccagcatcccagcgtcagacacagctgggctcgcctgtgccttgtctgtcccctctctgtgccttccatgtattgcgcccactgcctcggttgggcccccagcctcacagtcctgaaggctctgcttcaccccagtgctcagcttccctttgcctcaggcccagcgccctcgttcccgggtgccctgcctcaggctcctggacaggtcagggcaacgccagacagccactgtccaccaggcgcccccagcccctgttttcctagagcccattcggtataggatgcacaaccctgctgttcatttcactgctcggtgcacgtattcattccttccatttacgcctcaaacacacagcacgcaccttatatgctcttacctgtcaggtgcagtgtgatgcattgagaatgcgcctccagtgcacagggaacaaggcagggagccttctctgggcgctcccttcatcatggagaagatggactcagaatgtgtgatggaatgagccctggaaagtcagcaggtgccagggagtggaggatggacctatccaagccttgaggtgtgggtgaagttttgtgtgtccctggcctttccagaggctccctgtacccccatcttaggcaacttcttttatttatttatttatatttgtatttatttatttatatttgtatttatttatttattttgaggagtctcgctctgttgcccaggatggagtgcagtggcacgatctctgctcactgcaacctccctctcccgggttcaagtgatttccggctaatttttgtatttttagtagggacagggtttcaccatgttggctaggctggtctcgaactcctgacctcaagtgatccgcccacctcggcctcccaaaatgttaggattacaggcgtgagccaccgcgctgccctctttatttatttttagagacagggtctctctctgtcacccaggttggagtgcagtgatgaaatcatacctcactgcagctcactgcacgagccaccacacccagctaatttttgtttttttttttttcatagcttgctatgttgcccagactggtctcaaactcccgggctcaaatgatcctccttcctaagtctcccagagggctgggattacaggtgtgagccatggtggccggccaaccttgggcgatttctgagctccattcagttccacccccactgccaagccaagtggagggcaagataaagaggtcccagaattgggctaggaggataggttgggggcagggagtaattccaactgtgttctttttttttttttttttgagatggagtcccactctgtcatccaggctggagtgcagtagcatgatctcgactcactgcaacttctgcctcccagattcaattgattctcctacctcagcctcccaagtagctgggattacaggcatgcgcctccatgccaggctaatttttgatttttttttttttttttcagtagaaacggtttcaccatgttggccaggctggtcttgaactcctgacctcaaatgatctgcccacctcagcctcccaaagtgctgggattacagaaatgagccactgcacccggccaggtttttttgttgtttgttttttgttttgttttgttttgtttttttgagacgcagttgcccaggctggagtgcaatggtgtgatctcagcttaccacaacctccacctccggggttcaagccattatcctgcctcagcctccggagtagctgggattacaggcacacaccaccacgcctggctaattttgtatttttagtagagacggggtttctccgtgttggtcaggctggtcttgaactcccatcctcaggtgatctgcccacctcagtctcccaaagtgctgggattacaggcgtgagccaccgcgcccatcctcagggggtatattttgaaggtggagcagatggattggaagtgggatacgagggaaagaggtaagtcaaaatgtgtgagctgagtgagcccctggaaggatggagaggatggagaggaggcagttttgtaggttagatccaagcctttggtttgatatgtccaagtggaggcatgaagttggtgcccggggagaggttcaggctggccgagaaatggctcaaatgaacacgaatgctctcatttatactttatggtaactctgtgggtgggggactttctccccatcttatagaaggggcaacgaaggctccagaacatgcccaagtagttaaaaaatgtagttataggccgggcgcagtggctcacgtctgtaatcccattactttgggaggctgaggtgggcagatcacctgaggttgggagttcgagaccagcctgacaaacatggagaaacccggtctgtactaaaaatacaaaattagccaggcatggtggcacatgcctgtaatcccagctacttgggaggctgaggcaggagaatcgcttgaatccgggagctggaggttgtggtgagccgagatcgcaccactgcaatccagcctggagacagagcaagactcagtctaaaaaaaaaaaaaaaaaagaaaaagttaggttctgagccgggtcccagatttgggctgggaggatagggtgggggcagggaataattccaaccgtggtctttttcttttctcactctgttgtccaggctggagtgtagtgactcaatctcagctcactgcaacctctgtttcctatgttcaagcaagtctcctgcctcagcctcctgagtagctgggacgacaggcatacaccaccatgcctggctaattttgtatttttgtagagacagggtttcacaatgttgcccaggctgttctcaaactcccaggctcaagcgatcctcccgcctcggtctcccaaaatgctagcattacaggtgtgagccactgcgcctagctaggcaggactatttgaaaggcaccagggctaggctagcatggtgggaggccaggagagggtctagattatattcccagtgatactaggaaccccaagagggctttcagaagtgggtggcatgatcttatttggatgtttaaaagattatagggctgggcttggtggtgtgatcctgtatcctagctgaggcaggaggattcacgcacacaggcttgagcctaggacttctgggaggtggtgtgtgccatgaccatcggcgtcaatgtggtgaccccccaagagcaggggaccaccaggttgcctaaggaagagtcaactggcccaggttggaaacagagcaggtcaaaactcctgtgttgatcagtagtggaatcacgtctgtgaatagccactgcactccagcctgggcaacagggtgagaaaagaaaaagaccacagttggaattattccccgcccccaacctatcctctctaaaacctcccaaccctgtctctaaaacaaaacgttaaagtaaaaataaataaaataggccaggcacggtggctcatgcctgtaatcccagcactttgggaggccgaggctggtggatcatgaggtcaggagatcgaaaccatcctggctaacacagtgaaaccccatctctactaaaaatacaaaaaattacctgggcgtggtggcgggcacctgtagtcccagctactcgggaggctgaggcaggagaatagtgtgaacgggggaggcggagctttcagtgagccaagatcatgtcactgcactccaacctgggcaacagagcgagactctgtctcaaaaaaacaaatcaatcaataaaaataaataaataaataaaagattatatgagtgctccctcaataacacagaattactatatgaggcaggaaatggggagtgactgctaacaggtgtgagttttctttaggggatgatgaaaaacgtcttggaactagacatgatgaatgtactatgacatgacacgacatcgtccaccttaaaatggttggtggttaattttttgttgtgggaatttcagctcaattaaaaatgctggccgacgggcgcggtggctcacgcctgtaatcccagtactttgggaggccgaggtaggtggatcacgaggtcaggagttcaagaccagcttggccaagatggtgaaacaccgtctccactaaaactataaaaattagccgggcgtagtggcgggcgcctgcaatcccagctactcaggaggctgaggcaggagaatcgcttgaacccaggaggcagaggttgcagtgagccgagattgtgccactgcactccaacctgggcaacagagtgagactctgcctcaaaaaaaaaaaaaatgctaggggctggggcacggtgtcttacccctgtaatcccagcactttgggaggtagaggctggcaaatcacttgaggccaggagtttgagaccagcctggccaacatggagaaccccatctctactaaaaatacaaaaaaagttgggcgtggtggcacatgcccgtagtcccagctactccagaggctgaggcaggagaatcacttgaacccaggggcagagtttgcagtgagctgagatcgcaccactgcagtccagcctgggcaatagagtgagatgccaaaaaaaaaaaaaaaggaaggaaggaagataagaagggaggaaggaaggaaggaaagaaaatgctaggaatgctggtgtgctcttgtaatcccagctacctgggaggctgaagtgggaggatcacttgagcctgggagttagagactgcagtgagctgtgactgcaacactgcactccagcctgggtgaccgagcgatacccctatctcttaaaatatatatatatatataatttattgattattattatatattgtatatattatataatattatatattataatattatatataatattatcaaaaaatattgatataatattatcaataaatatcaataaaataataataatcaatatatataattgattatatatattatatatattatatatattatatataattgatatatataatatataatatattatatattatataatataatatattatatattatataatattatatattatacattatataatattatatattatacattatacattatatattatacattatataatattatatattatatattatacattatataatatatattatattatatattgtataatatatattatattatatattgtataatattatatattatattatacattatacattatatattatacattatataatattatatattatattatatattgcataatattatatatcatatattatatatataatatataatattatatattatatattatatatataatattatatattatatatataatatataatattatatattatatatataatattatatattatatatataatattatatattatatattatatattatatattataatatatattatatattatatattatatattataatatataatattatatattatataataatatataatattatattttataatatataatattatatattataatattatatattatatattataatattatatattataatataatatataatatataatatataatatataatatatattatataatacataatataatattatatataatatataatattatattatataatattatatataatatataatatataatatataatattatatattataatatataatatataatataatatattataatatataatatataatataatatattataatatataatatataatataatatattatacaatatataatatataatataatatattatacaatatataatatataatataatatattatacaatatatagtataatataatatataatataatatattatactatatatagtataatatattatataatataatatattatactatatatagtataatataatatataatataatatattatactatatatagtataatataatatataatataatatacaatatatagtataatataatatatattatataatgtataatatatactgtataatatataatatataatgtataatatataatgtataatatatattatataatgtataatatataatatattgtataatatataatatatattatattatatatatcaattatatataatatatataatatatataatatatacaatcaattatatatatattgattattattattttttaattatacaggtcagccgggcgcagtgactcatgcctgtaatcccagcactttgggaggtcaaggcgggaggatcgtttgagcccaggagttcgagaccagcctgggcagcatagcaagacctggtctctaaataaataaataaataaataaataaattatatagtcaatttgagagggagccaggagattcgcgaggtgatcaccactgtcatccaggtgacaggcaggtgatggaggcccagaacaggatgctggggggaaacgttaggttttgggcatgtcttaggggcagagtcaacaggaccccttactttgcaccctccttgaactctgctcatgttacttcctgaccactctattgaaaatgcaaaacacaggacggggcgcgctggctcacgcctgtaatcccagcactttgggaggccgaggcgggtagatcacgaggtcaggagctcgagaccatcctggctaacacggtgaaaccccgtctctactaaaaatacaaaaaattagccaggcgtggtggtgtgtgcctgtagtcccagctactagggaggctgaggcaggagaatggcgtgaacccgggaggcggagcttgcagtgagcagagatcacgccactgcactccagcctgagcgacagagcgagactccgtctcaaaaaaaaaaaaaaaaaaaagaaaagaaaagaaaatacaaaacacaaaaattagctgggtgtggtggcgcatgcctgtaatcccggctacttaggaggctgaggcacaagagtcgcttgaacccgggaggtggaggttgcagtgagccgagatcacacctctgcactccagcctgggcgacagagcaagactctgtctcaaaaaaaagaaaactgcaaacacccccaccctcctcactcccttgatctcctctcccctttatctctctccagtcccagagatgtggggggggggggggtctcgctatgttgtccaggctggtctcgaactcctggtccccacagcatatcctgacctagtttcgttttcattcatttatctgtctccctcactagaataccaactccccagtccagagatgtttgtttcttgttcactgctgtctacccggagcctaggaccgatcctggaacatagtaggcgctcaggagaaagcgggggagtggaggaaagcgagaatcccggaagccgccgggttccagcctgagcagcaggcgggcgtttaagtggaggcggattcctagttaggcaccagctgaaaggggagcccggctgggctgcgcttccttccccggccgctaggggccgcttccccgctgctctgcggccgccaggtgagggggccccgccccttctccccaggtgctcagggagttggggtgtgaggggacaaagtgggggtgaagggagagagctgagcgtgtttgagatgggggctgcttaaaggaagggaaaaatgcgtagggaggttgggaggtgtgagaaggtgaggagacagcccggtgttagggagagaggagcggagagttgagggaggtgcgggaagatgggtgatcaactggggagtccgggaaagtctggcaggcggaaggccttgccctggtggctccactggaggaaatttagaccatgcatggaaaagaccgggacgattgaggggtgggattggcctgtggggttgaggatcccagggaagaagccctaagctttgctggacttggacttggccagtgtgttctggggaggaagagggatttctcagacccagatccctcagaccagcaacggggagggacttctcctttgaggagtgagatgtgcctggcaagctcaccagctagcttttgcagaacgtgtggccagtaagtggcttattcaacctggcactgactctgcctctctctccttcaagcctcagggccaggattcattgtgtaatgaattgagtggtgggaaaacagcaatgaatgagacagatccagtcccggcactggccagtcctggcacaaagaaggctgcccagccctggggaagtgacaggtaaactgaggcagggacctgctggctttaaatagcagtccccctcatggtgatctgggcagagaggaccactcatatggaggctctgaggctgttaccaagaaaaaagccggcaggatccaagctgcaatagtgtgatagggagtgttggggtctgcggcaacccagaaatgcctgccaggtctaaagggatcctgtgtttgggattaaggtggatgtgggggcttgcaggctctgtggaatggagataggttgggaagggggttgggaataggagtgaggggttataggtgggtcccagagaggtagaggtgatggccacgggaaggtagaaggtgactcctaaccttgcatgagctcatttcaggggacacaaagccaaatgctgaccagggaatgaaaatgcagaaattgggcaggtgtgaggcggtggtgaaggacagggtagctgaagttgcaccacccccccttttccttaggcacccgcttgctaccactcagctccagctgtgcgctaccacgtgggaactcaggctcaatgttgccaaaatagcttcttcaagagaagccagaaatcacggttgttgcgcaaaattccctgagctttaaatatcccatggggatctactaaagttaaattgctgccacccagcaattccattcctgggttgattcccagtgggaacaggagcttagggtcacctaaagacatatccatggatgtgcctagcagcttcattcatgatcaccaaacaccagacaccccttaagttgaccatcgactggcaagtggaaaagaaatgggaggacattcttataatggaatataacgcagcaatgaaaaagaatatactactgacgcattcacagcatggatgaatcccagagacataatgttcagtaggagaagcaagataacaaagagaataccccgagtgatttcattctgtgttgttcaaggccaggcagaagtaacctatgaaaagagttggggaagcccagggtttccttacttcggcctcattgacatttgtggctaaatgatcctgcgtgatgggggctgtcctgtgcactgtaggacgttgagcagaatccctggcctccaaccattacgtaccagcagcaccccccagttgcgacaaatttctgttgttaggggcataatcaccatcagatgggagccactggtccgggtgtagtggctcacacctgtaatcccagcactttgggaggccgaggcgggtggatcacttgaggccaggagttcaagcccagcctggccaacatggtgaaaccctgtctctactaaaaatacaaaaaaattagccagacatggtggcgtgtgcttatagtcccagctacgtgggaggctgaggcaggagaattgcttgaacccaggaggcagaggttgcagtgagcaaagaaagatagcaccactgcactccagcctgggtaacagagcaagactacgtctcaaaaaaaaaaaaaaaaaaaaaaaaagccactggcttggtgatgttttgaggcagcccacttcctggaaagtagcccagggagcctcctgggagactggactgttcttgatcttgaactaggtgacagtgataagggtgaaatgtatttcaaaaatccacggacctgtgctcctaagatttatgtgtttcacaataaagacattaactctacaacatggatgacccttgaaaacatttggaaaagggaaagaagccggacacagagggtcacatagtgtatgacttcctttatatgaaatgcccaaaacaggtaaacacatagggacagaaacagattggtggttgccaggggatgggggatggggaatggagattgactgctagtggggatagggcttcttttgggggtgatggaaatgttctgtaattagaggtgatagttgcacaactctttgagtatacaaaagtccagtgaattgtacattttaaaatgtacaattggggccaggcacagtgactcatgcctgtaatcccagcactttgggaggccgaggcgggcagatcacttgaggtcaggagttcaagaccattctggccaatatggtgaaaccctatctctactaaatatacaaaaattagccaggcatggtggtgcacgcctctagtcccagctactcaggaggctgaggcaagagaatcacttgaacccaggaggcagaggttgcaatgagcaaagatcgcaccactgcactccagcctgggtgtcacagcaagactctgtctcaaaaaacaaaaacaaaaaaatgtacaattaatcttggctgggcacagtggctcatgcctgtaatcctaacactttgagaagcagaggtgggaggattgcttgagcccaggagtttgagaccagcctgggcaacatagcaagaccccacctctacaaaatttttttttttttttgagacagagtcttgctctgttgcccaggctggagtgcagtggtgcgatcttggctcgttgcaacctctgcctcccaggttcaagcgattctcctgcctcagcctcccaagtagctgggattacaggcgcgtgccactacacctggctgatttttgtatttttagtagagacagggtttcaccatgttggccaggctggtctcgaactcctgacctcaggttatccacccacctcagtctcccaaagtgctgggattacaggcgtgagccacagtgcccggcgaaaattttttttaattagctgggcaacatggagcctgcctgtaatcccagctacttggaaggctgaggtgggaggatcgcttgaccccaggagtttgaggttgcagtgagctatgattgcaccactgcactccagcccggggaaacagagagagattctgtttctaaaaataatataaaataaaatggcgagtgttacgttaggtgaattttattccaaaaaggaatttaaaatttttttttaattttttttaaaaaaggaattttttaaaaacaaggagttaaccacacaggccaaacaacacatctggggccagtttggccccagggctgccgtcatttgggaatggagggaaaggaaggggacggggtgggggggtgggagggtaatgcaccatccaggagttgtgggcgttcttggtgaagggtgggggatgacgcaacttggaggcaaaagaaagtatgtctcggctcaggggagcgctccctcttaacccaacctgtcagccctggaaagaaatcagctacgggtcggaggccagccagcgaactgtcaaggaagtgcagagttctgacgagttagagaaatgacaaccgctcagccccgcccggcctgacaccctggcggtggcatgatgaagtggtgcttgccgggtgggcggaggatgctctctgcgagcttgcgggaaagtgggggtgctcacccgagttcttctgcagtgtgaagagaggtgggttcggcctccctggtaacaaagggcggacggggtggcatttgcccctacccatccctcctggagggagagccattcccgtgggtgcaaggaagagagaagacagcgggcttctgggggcacggctgggggtgcagggtctgagtctccgttggcttcaaaaaactgaatgatggccgggcgcagtggctaacacctgtaatcctagcactttgggaggctgaagcaggcagatcaccggacctcaggagtttgagaccagcctagccaaaatagtgaaaccctgtctctactaaaaatacaaaaattagctgggtgtggctgcaggtgcctgtaatcccaactactcgggatgctgaggcaggagaattgcttgaaccctggaggcagaggttgcaatgacccaagattgcaccactgcactccagcctgggcaacagagcaggactccactcaaaaaataataaaataaaataaaaaactgaatgagtgaagagagacaaagaaaattaaggaggccaggcacggtggctcatgcctgtaatcccagcactttaggaggctgaggcgggcagatcactggaggtcaggagtttgagaccagcctggccaacatggtgaaactctgctctaccaaaaagtacaaaaattagccaggtgtgatggcgggccctgtaatcccagctactcgggaggctgaggcaggagaatggtgtgaacccgggaggcggagcttgcagtgagccgagatcgcgccactgcattctagcctggacgacagaacaagactccgtctcaaaaaaaaaaaaaaaaaaaaaaagaagaaagttaaggcctcccgagtagctgggaccacaggcgcacaccacaacacccagctaactttcatattttttgtagagatagggtttcgctatgttgcccaatgtggtcttgaactcccggctcaagtgatcctcctgcctcagcctcacaaagtgctgggattataggcgtgagccactgcacctggcctgcatataactttggacttcccaaaaacttaaccactgatagcctatggttgatcaaaagccttaccaatgacataaacaatccatgaactcgtattctgtatgttctatatattacatacagtattcttagaataaagtaagctagaaaaaagaaatggtatgaaaatcatgagaaagagaaaatgtatttaccgttcatgaagtggaagtggattaccataaccgtcttcatccacgagtcttccgatggaataggctgaggaggaagaggaagaagaggggttgtctcaggggtggcagaggcggaacaacatccacttacaaggggactcaggcagttatggctcaagcccgtgttgttcaaaggtcaactgtaatagaattttttctttttcttttttttttttgaggcagagtctcgctctgtcaccccggctggagtgtagtgacgagatctcggctcgctgcaacctcggtctcccgggttcaagcgattctcctgtctcaacctcccaagtagctgggattataggcgcccgccaccacacccggctaatttttgtatttttagtagagacggggttttgccacgttggccaggctggtctggaactcctgacctcaggtgatctgcccacctcggcctcccaaagtgcagggattacatgtgtgagccactgcacccagccagtagaaatgtattgcttacagttctggaggccaggaagtccaagatcaaggcactagcagatttggtgtctggtgagagcccactccaccccccaggttcaagcgattttcctgcctcagcctcctgagtagctgggattacaggtgtgcgccaccatgcctggctaacttttgtatttttagtagagatggggttttgccctgttggccaggctgttcttgaactcctgaccttaggtgatccacccacctcagcctcacaaagtgctgggattataggtgtgagccaccgcacctggccaagcgagttatttttattttatttatttgtttatttgagacaagatctggttctattacccaggctggagtgcagtggtgcgatctcggctcaccgcaacctccatttcccgggctcaagccatccccccacctcagcctcccagggagcagctgggactacaggtgcgcaccactacacccaactgattttttttttttttcagacggagtctcactctgtcaccaggctggagtgcagtggcgtgatctcggctcactgcaacctccgcctcccaggttcaagtgattctcctgcctcagcctcccgagtagctgggattacaggtgtctgccaccatgcctggctaattttctctatttttaatagagacggggttttaccatgttggccaagatggtcttgatctcctgacctcatgatccacccgcttcgacctcccaaagtgcagagattacaggtgtgagcgaccgcacccggccaatttttgtattttttgtagagatggggtttgtcatgttgtccaggctggtatcgaactagtgagctcaagtgatccgtctgcctcagcctcccaaattgctgggattacaggcgtgtgccactgtgcctggcctatttatttatttatttatttatccaatgtttgttttaagttcaagggggcacatgtccaagtttcttatttgggtaaattgtgttttgcaggagtttggtatacagataatcttgtcacccaggtaatcaccataacacccaacaggtagtttttcaatcctgaccctccttttaccttccaccctcaaatagacaccagtgtctgttgttcccatcttttttttttttttttttgagatggagtcttgctccgttgcccagggtagagtgcactggcataatttcggctgactgcaacctctgccttccgggttcaagagattctcttgcctcaccctccctagtagctgagattataggtgtgtgccagcacgcctggctagtttttgtatttttagtggaaatggggtttcaccatgttggccaggctggtctcgaactcctgacctcaagtgatccacctgcctcagcctcccaaagtgctgggattacaggcgtgagccgctgtgcctggcctgttgttctcacctttgtgtccatgtgtactcagtgtttaactaccacttataagtgaaaacgtgtggtatttggttttctgttcctgcattagttgacttaggagaatggcctccagctccatccatattgctgcaaaggatataatctcattctttttttttttttttttttttttgagacaatctcattctgtcacccaggctgaagtgcagtgtcgtgacctcggctcactgcaacctccgcctcccaggttcaagcaattctcctgcctcagcccctcaagtagctgggactacaggcacctgccaccataccctgctaatttttgtatttttttgtagagacggggttttgccatgttaaccaggctggtctcgaactcctggcctcaagtgatccacccaccttggcctccgaaaatgctgggattacagccatgagccaccatgcccggcctcattcttttttaatggctgcatagtattccatggtgcatatgtaccacattttctttatccaatcctccattgacgggcacctaggctgattccaagtctttgctattgtgaatagtgctgcaatgaacatacatgtgcatgtgtttttatagtagaacaatttatattcctttgagtatatacccagtaatgggattgctgggtcaaataaaatagaagaattttaaattgtttgagaaatctccaaactgtcacactcaattataagggcaataatctcacccatgagaatggggccctcctggcctaatcacttcccaagaaccccaactcttccaacatatggatttggaagggacacagacattcaaaccatagcagtgaccttatttggacaaagcgtttttgcagatgtaattaagttaaggattttgcaatgagatcatcctggattagggtggcccaaaatccaatgataaatgaccttagaagagaagggggttagacacagagaagaaggccaagtgaagacaggcagggctttcagcagtacagacacaagcaaggaaccatcagaggctggaagaaaaaaggacgaatcctcacctagtgccttcggagggattgcagccctgcaccaccctgattgcaacctctggcctccggaatggtgaaataataaattcttgttgtttccagccacctagtttatggtaatgtatttcagcagccccaggaaatgaacacaggccctgatatccaattccacaagcacttgatgaagcgtcaggaagggcccgtggtacagtggagggggagggaaactcgaaaatggggagtgttgagaaacggatggacagtgaggtggaggaccagagaggcttttttttcttttcttcttttttttttttttagacaggacctctcttcgtcacccaggctagaatgcagtggcgcagtcgacctcctgggttcaagcgatcctcctgcctcagcctcccgagtagctgggactacaggcacatgctatcatgcatggctaattatttatttattttttgtagagatggggtgtcactgtgttgcccaggctagtcttgagctcctggcttcaagccatcctcctgtcttggcctcccaaagtgctgagattacaggcttgagccaccatgcccagactggggaacctctttatagcagaggtgatgacccagaactgagctggagcatgccacaaacctacagggacagccagtaggtaatataaatacgccaagcagccaagataaaaagactgactgcaccagcaacggaacagcttcagtgtcagggagacagtaagggggggtgggactatggcaaataatgataagaatgagtaacatttatcagcacttgctaagcccgttccttatatagcatgaactcatttaattcagttgtgttttttttttttttttgagacaagtcttgctgtgtcacccaggttggagtgcagtggcacaatctcggttcactgcaacctccgtctcccaggttcaagcaattctcctgcctcagcttcccgagtagctgggattacaagcacgtgccaccacacctggctaatttttgcatttttagtagagacaaggttttgccatgttggccaggctggtctcgaactcctgacctcaggtgatctgcccatctaggcctcccaaagtgctgggattacaggcatgagccaccacgcccagacaagatttcatctttagaggaagtcaggcatccagatttttatgcaaaaatcacctgaggtctggcactggtggctcaggcctgtaatcccagcactttgggaggctgaggggggcgaatcacttgagttcaagagctcaaggccgcctgaccaacatggtgaaaccctgcctctactaaaaatagaaaaaaactagctgggcctggtggcctttgcctgtaatcccagctacttgggaggctgaggcaggagaatcgcttgaacctaggaggcagaggttgcagtgagcagagatcacaccactgcactacagcctgggcgacacagcgagacgccatctcaaaaacaaaaacaacaacaacaacaatgaaaaagcagcctgtatttaaaagctagcaagtcatgggccgggcgcggtggctcacgcctgtaatcccagcactttgggaggccgaggtgggcagatcacaaggtcagaagatcgagaccatcctggctaacacggtgaaaccccgtctctactaaaaatacaaaaaattagccgggcgtggtggggggcgcctgtagtcccagctactcgggaggctgaggcaggagaatggcgtgaacccgcaaggcagagcttgcagtgagccaagatcgcgccactgcactccagcctgggtgacagagtgggactccatctcaaaaataaataaataaataaataaataaataaataaataaataaataaataaaagctagcaagtcattacaaaatgtttttaaagcctgcatggaccaagccaattacatctgtgggctggattcagctctggggcggacacagagggaggggcggggcatttagtgaaggcgatgcaaagcatcatgggtgagttggggaccacatgggccagggggtttgactaggtggtgcctaggcgggtgccagcatgtttgtcggggctggcgcggtggagggggcgtggtttaaactgaacaggtgttttgggtctaggttggaaaggacctttggagccacgataacatttttcaattttgaagaagtcagtgatagcttttaaacagctgaatgactcagtcatgcctgtctgtccccatcccccaatcccaacacccagaaagctgtgaatcaggctttctttgggggtggagggacagtagatccatccatgaaggaaacaaactaaacagcccccgtcttccagcgcgctcacagccgccggggagagggggaaggtgtccttagtaaggttaggataggatggcagccgtgatggtgggaccgtggcagagggttagtggttgtctgcagatatgggagccactgctatgtgttcaatgcactaaggatgcaacgacgaacaggacagacatggccctgccttcaaggaaaaagactgtgaaggaggaaggaaataaggagagacggtaattccagggggtgatgagaaaatgtaaaaattaaaatagcaggatgggggatggggctcagatcggcagcctacaggcccaggagacagagcgggtgggcaggaggatggaggatggggagcgggggtcctcagtggctcacaagccaccgcttgctccctgggacccagcagcctggctgggcctctgtctccccagaatcaccctatcacaccaagaacaaacccacggctgacatagattcctgactccgagcccaagcaagggggagaaaggggaggaaaaaaacacccatctgttcttcctctgatggaatgtgatttttcacccagtgcttaaacctcgagcttctcctcccatttcctctcggcagccgcagcgaagcgatataaatcgctgtaaatgggttttcccggccggttgccgtgttgttttaataatggttcattttctgcctggggggaaaaatagttggtaaagaaattgaggagggggggttcattttgtgtgtgtgtgtgtgattgtgcgtgtgtgtgtgtgtgtgtgtgtgtcctgttgccttagagaagattcccgaatattccactgggacaccaagtgacccgtccagttggggaattggggaattgctggtcagagaaccagtgcatcccacttgcctggacaaaagggattcctttttttttttttttttttttttttttttgagactgagtcttgctctattgcccaggctggagtgcagtggtgcaatcccggctcactgcaatctccacctccctggttcaagcgattcttctgcctcaacctcctgagtagctgggattacaggcgcccgccagcatgcctggctaagttttgtattttaagtagagacagagtttcgccatattggccgggctgatcttgaactcctgacctcaagtgatctactcaccttggcctcccaaagtgctgggattacaggcgtgagccgccgtgcctggccgaaagggattcatttgcaaacctcctgggcacatatattaagcactaactgtgtgctatgcctgactaggtgcgtgggatatgtaaatgaataaatctcccaggccctgacctctctgggggctcacattctagaagcagagagagcaacattaagacatcactctgccaaactaggtaattacaattgtggaaactgctctgaggagactgttgagtgccacgggaatggaaaacggatcttggcagggctgggctgagcatggtggctcacagctacaatcccagcactttgggaggctgaggcaggaggatcgcttgaggccaggagtttgggaccagcctggacaacatagcaagaccaccaactctaaaaaaaaatttaaaaattagctgggcgtggtggcacatgccttctagtcccagctacttgggaggctgaggcaagaggatcacttggacctaagaatttgaggctgcagtgagctatgatcatgccattgtactccagcctgggccacagaaaaagatcccatctcaaaaagaaaagaaggctgggcatggtggttcatgcctgtaatcccagaactttgggtggccgaagtgggtggatcacttgaggccaggagttcgagaccaaactggccaacatggtgaaaccccgtctctactaaaaatacaaaaattagccaggggtggtggctcatgcctgtaatcccacctactcaggaggaggcaggagaattccttgaacctgggaggcgggggttggagtgagccgagattgtgccactgcatttcagcctgagggacagagtgagactctgtcagaagagaaaggaaggaaagggaaggggaggggaggggaggggagggaagaagagatcttggcataacccaaacccccttcagaagggtcaccctggctgctactttaaggataggcagacagagggagttgtgggagggaaggccagtcaggtggagagacttcctgggcaaacttctggaggttgaaagagtgtgatgtgggctctgacctgggagaacagtcatggagccaaggatagtgggggcgggggatgctggggtcctggggaatggcgtggggagtggccagagacttgaggacttttgtcttgttcctgagcagagtcttccattcctccggcattgagacttttttttttcttttttttttttttttttgagacagggtctcactctgttgcccaggctggagtgcagtggcgtgatctcggcttactgcagcctccgcctccagggttcaagtgattctcccgcctcaacctccctagtagataggattacaggcatgcaccaccatgccagttaatttttgtatttttagtagagacagggtttcactatgggtgaacttgctggtctcaaactcctggcctcaggtgatctgcctgccttggcctcccaaagtgctgggattacaggcatgagccaccacacccagccaggctctttttatagacaaagatgttagcgttctcgccctctcatctcacagggcatgaggtctctctccagcctcttgtgtgaaggcacaggtcccattcacgaggtctccaccctcctcatctcccataggccccaattcttaacaccacgacctggggggttaagatttcaacatatattggccaggcatggtggtgcacacctgtaatcccagcactttaggaggccaaagtgagcagattgctttgagctcaggagtttaagaccagcctgggcaacataccaaaaaccccatccctactaaaaatgcaaaaatcagccaggtatggtggtgggcgcctgtaatcccagctactccggaggctgaagctggagaatcactggaactcaggaggtggagtttgcagtgagccgagattgcgccactgcactccagcctgagcaacagggtgatgagactccatctcaaaaaaaaaaaaaaaaaaagataaaaaagatttcaacatataaatttggggggacacaaacattcacaccaaagcacttggcttgccaagtcatctccccaccccagccccatccgtttactccctacagttggttgaatgacagtcctccaaaaatgtacattcatatcctaacccccagagcctgtacgtgtgatcttatttggacaaagggtctttgaagttgtatttatgtgaagaatcctgacatgagatcatcctgaattagaatgggctctaaatctattaataagtgtcctggccgggtgcggtggctcacgcctgtaatcccagcactttgggaggctgaggcaggtggatcaccgaaggtcaggagtttaagaccagcctgaccaacgtggtgaaaccccgtctctactaaaaatacaaaaattagccaggtgtggtggcgggcgtccgtagtcccaactacctgaaagactgaggtgggaagatcagatcacttgagttggggaggcagaggctgcagtgagccaagatcatgccactgcattccagcatgggtcacagagccagagggaaaaaaaaaagaaagaaagaaaaaatgtcatcagaaaagaatggagaggccaccgtgactcacacctgtaatcccagagccttgggaggctgagttgggaggatcacttgagcccaggagtttgagatcagcctgagcaacatagtgagacccctgtctttagaaaaaagtttttaaaaattagtggggcttggtggtgtgtgcctgtagtcccagctactcaggaggctgaggtgggaggatcccttgagcctaggaggtcgaggctgcagtgagccatgattgtaccgcttcagtctaggctgggtgacagagcgagattccgtctcaaaaaaatttaaaaaaaaaggaaacgaaaaagaaaaaaagggaaccagacacagagacacagggaaaaagtccatgtgacaatggtggcagaaactggagtgatgcagccacaagccaaggaatgctgggagccaccagaggcttgaagaggcagaaaggatcctcccctagagcctccagagggccaccttgacttggggctaatgatactgatttgggacttaagggatccagaactgtaagaaaataaatgtgttttttttgtttttgttttgaaattatattttattgatatataatagtcgtattgttttgttttctgctgtcctgaagccacctagtttgtgggcattggttacaacagtcacaggaaatattatagttggccctccatagccacgggttccttatccaggattcaacaaactgtgaatggaaaacattagggaaaaaaaccctaatcctagcactttgggagggtgaggcaggcagatcacttgaggtcaggagtttgagaccagcctggccaacatggtgaaaccctgtctctactaaagatagaaaaaaattagctgggcgtggtggcagacacctgtagtcccagctacttaggaggctgaggcaggagagtcgcttgaacctgggaggtggaggttgcagtgagccaagatcatgccattgcactccagcctgggcaacagagtgagatcctgtctaaaaaaaacaaaaagaaaaacaaaaaacaacaacaaaaaccctggctagccatgctggctcatgtctatagtcccaagaatttgggaggctgaggtgggcgggttgttggagcccaggagttggagagcagcctgggcaaagtagcaagacccccatctctacaaaaaacattaacaaaataagtccagtgggtggcgcacacctgtggtcccagctactcgagaggccaaggcaggagaattgcttcagcctgggaggttgaggttgcactgagtgatgattgcaccactgcaatccagcctgggtgataaagcaagactctatccaaacaaacaaacaaacaaacaaacaaaacaaaccatattttatctatttatcatttttattattttaaattattattattatttatttatttagttttgagacagagtctcactctgtcgcccaggctggagtgcagtggtgcgatcttggctcactgcaagctccgcctcccaggttcacgccattctcctgcctcagcctcctgagtagctgggactacaggcacccgccaccacgcctggctaattttttgtattattattattattttctttttttttttagatggagtctcgctctgtcacccaggctggagtgcaatggcacaatctcagctcactgcaacctccacctcccggattcaagtgattctcctgcctcagcctcccgagtagctgggactacaggcatgtgccaccatgcccggctatttatttatttatttatttatttgtatttttagtagagacggggtttcaccatgttagccagaatggtcttgatctcctgacctcttgatctcctgacctcgtgatccgctgcctcggcctcccaatgtgttgggattacaggcgtgagccaccgtgcccggcctatgtttaattattttattattttaacaattatctttatggttaaaaatatcacaacagtaaaaaaaaatacattctctgcagcccggattcagaaaatgataaaaattaaaaaataaaaatgagggaggcggatcacttgtggccaggagttcaagactagcttggccaacatggtgaaaccccgtctctactaaaaatacaaaaaaattagccagtcatggtggcacgtgcctgtaatcttcgctactcgggaggctgaggcctgagaatcacttgaagccgggaggtggaggttgcagtgagccaagatcgcgccactgcactctagccacacatatgtatacatatacatatatgtgtatatatacatacatgtatacagcatatatacacatgtatgtatatatacagcaggatgtgcataggtgatatgcaaatactatgctgttttataaaagaaacttgagcatctgtggattttggtatccagggaggtcctggaaccaatcctacaggatgcaaagagaggactagaatacattccctttcctagcaaaacatcccaagagttatcactgggtccggctgctcttctctcgtcctctctctgatcctctcctttcagtattttgttcccactcggccactagaagggctccatcctgcccaacctgatggtcgtttctcagcctctaggactgtgcactcccagcttcccctcccacctccaaggccaccacttcttagtctcttctgtgattcctcttcatctcccaatcttagccttgaagagaaagccaagagccaagatcggatcattgctcaccagcctgggcgacagagcgagactctgtctcaagaaaaaaatgattaaaataaaataaaataggctgggcacagtggctcacgcatgtaatcccagaactttggaaggtccaggcgggcagatcacgaggtcaggagttcgagaccagcctggccaagatggtgaaaccccgtctctactaaaaatacaaaaaatttgccaggtgtggtggcgggcacctgtagtcccagctactcgggaggctgaggcaggagaatggcgtgaacccggaaggcaaagcttgcagtgaggcaagattgcaccactgccctcctgcctgggcaacagagcgagactctgtctaaaaagaaaaaaaaaagaaaacaattaataaataaaaataaaataaatgctgggctgagcgtggtggctcactgtaatcccagcagtttgggaggccgaggttaggagtttgagaccagcctggccaacatggtgaaaccccatctctactaaaaacacaaaaggtagtcgggcatagtggcaggcacctgtaatcccagctactcaggaggctgaggcaggagaatcacttgaaaccggaaggtggaggttgcagtgagctgagatctcgccactgcactccagcctgggcaacaagagtgaaactccatctcaaaaataaataaataaataaataaataaataaataaataaataaataaatgccacttacacccgacagctcccagtggcgtcccccacctctcacctctctgctgaccttcacctgccccccagatgtctctgctggaaacccagtgggcacacccaagtatcacaccggaagcagactcttcatcacactccagacctgtttcctcctctgtcctccccgctcctctgtcctccctgctcctctgtcctccccgctcctctgtcctcccctcctctgtcctccccgcccctctgtcctcccccctcctctgtcctcccccctcctctgtcctccgcctcctctgtcctcccccctcctctgtcctcccccctcctgtgtcctccccaaatcagttaatgacacatcatcgtcctctattggtgcaggagctggaatagtgtcttcctcccctgacaaaattcatgtttacctggagcctcagaatgtgaccatatttggaaatagcatctttgcagatgtcattagttaagttaaaataagatcttactagcccagcactgtggcttgagcctgtattcccagctatgcaagacgctgaggtgggaggatcacttgaggccaggggtttgacaccagcctgggcaacataatgaaaccttgtctctacaaaaataaaaattttttttttttttgagactgagtctcgctctgtcacccaggctggagtccagtggcacgatctcggctcactgcaagctccatcttccaggttcacgccattctcctgcctcagcctcctaagtagctgggactacaggcgcccgccaccacgcctggctaatgtttttttttgttgttgttgtttttgtatttttagtagagatggggtttcaccatgttaaccaggacggtctcaatctcctgacctcgtgatccgcccgccttgacctcccaaagtgctgggattacaggtgtgagccaccacacctgggctttttgttttgttttgttttttgagacagagtctcactctgcagcccgggctagagtgcagtggcacgatctctcctcattgcaacctccgcctcttgggttcaagtgattctcttgcctcagcctcccaagtacatgggattataggcatgcaccaccacgcccagctaattttgtatttttagtagagatgaagtttcaccatgttggccaagctggtctctaactcctcagctcaaatgatccactctcctcagcctcccaaaatgctgggattacagttgtgagccaccacacccagccaaaaattttaaaaaattagccaggcatgtggcacacacttgtagtcccagctacttaggaggccaagatgggaggattgcttgagcccaaaaattggaggctgcagtgagccatgattgtgccactgcactccagcctgagtgacagagtaagaccctgtctcttaaaaaaaaaaaaaaaaagatgaagtcttactggactagaatgagccctaaatccaatgacaagtgtccatctaagaagaggagaggacacagagacacacagagaccatggaagcctctccatggaatgactggaatgatgcagctttgagttgaggaacaccaaggattacaaggagctaccaaaatctaggagagagacaaggaaggattcttccctagaaccttcaaagggagcccagccctgccaacaccttgactttggactttgagcctgcagaactgtaagagaataacaaacttatgttgcttcaaaccaccaagtttgtggtaatttattgcagcagcactagaaaactaatacagttgggtgcttcagaagtgtacctgagacactctgatttgagtaaaagtggtttatctgtaaggtgattgcagggagtgctggcaggggatggaggagatgagatgcagaagggagggcagccagtacatcatgtggaaatgagcaggttattctgcgatatctaggtcttaactcatcttggacaaaccctgagagttatcttatgcaaagggtgagggagctggggtatttatcctccaactcccagccattgttagttgaggtatgctagcagggaaaatgaattctccagaacttctggctgcctgcatgcaccagagcaaagctgtcaggcaaagagtcacaggtacaggtggtatgaagccactggattgacgtgcatggtgtagggacagcctctaagatggccctcaatgttccaacccttgcattaatgccctacccttgagtgtggttagactctatgacttgcttcctgcccatagaatgtggcaaaatcgatgcaatgtcacttctaaaattaggtcacaaaaaagaccacgcctttcatcttgggtgcactcccttttttttttttttttggagatggagtcttgctctgtcgtccaggctggagtgcaatggtgcaatctctgctcactgcaacctccacctcccggttcaagtgattctcctgcctcagcctcccaagtagctgggattacaggcatgggccattatgcccagctaattttttatttttactagagatggggtttcaccatgttggtcaggctggttttggactccagacctcacccacccacctcagcctcccaaagtgctgggattacaggcgtgaaccattgtgcccagctggatgcactccctttcttgccctctcttctgctcactctgagggaagccaactgccaggctgtgagctgcccatcggagagggtcacaaggccaggaaccagaagaggcctctgaccaacagccagtgggcaactgatcctgccaacaactcatgagcttgaaagtggatcctccccagtcgagctttcagatgagatcatggcctcagtcaccaactatttctttttaattgagatgcatccatgcccatttgctttttgttgttgttagttaattaattaattaaaaaatagagatagggtctcactctgctgtccaggctggagtgcagtggtgcgatcaatagctccctgcagtattgaactcctgggctcaagggatccttctacctcagtttcccaagtagctgggactataggtgcatgccaccacacctggctaattttttgtttagtttagtttagttttgttttgagatggagtctcactctgtcacctaggctggagtgcagtggtgcaatctcggctcactacaacctccgcctcctgagttcaagtgattctcctattcagcctcctgagtagctgaaactacaggcccatgccaccatgcccggctagattttgtatttttaatagagatggggtttcaccatgttggccaggctggtctcaaacttctggcctcaagtgatccacctacttcagcctcccaaagtgctgggattatagaggtgagtcactgcactggcctaaaatttatttaattgacaaattaaaattgtacgtatttatggtgtatgacatgatgttttgaagtacatatacatttcagaatggctaaatggagtgaattaacatatatattacctcacatgcctatttttgtgtgtgacaagaacacttaaaatctctctcagtgattttcaagtatacgatacattgttattagctatagtcaccatactgtagaagacatctcttgactgtattcctgtctaactgaaagtgtatagcctttgactaacatctccccagtccctccactctagcccctggtaaccaccattcactctctgttctttttctttcttttttggaaacagggactcactttgtcatccaggctggagtgcagtggcatgatcatggctcactgcagcctcaacctactggggtcaggtgttcctcccacctcagcctcccaagtagctgggactacaggcacacaccaccatgcccatctaattttagtattttttgtagagatcaggtttcaccatgttgcccaggcctgtctacaactattgagctcaagcgatccacctcccttggccccccaaagtgctaggattatagggatgaaccaccacgtgcaatctcggctcattgcaacttctgcctcccaggttcaagcgattatcctgcctcagcctcctgagtagctgggattacaggtgcgcaccaccatgcccggctcatttttgtatttttagtagagacggggtttaaccatgttggtcaggctggtcctgaactcctgacctcatgatccggccgccttggcctcccaaagtgctgagattacaggcgtgagcgactgcacccggatagtaacccatctgtaccccatcactgtagactcccctctttctgtcatccctcacatccaatccattagccagccctgtccactccaactccaaaacccaccctgagcccatagagccttcctcacctgcactgccaccagcctgggacaagtcattcttgtctgtcatctgaattgtagcaaagatctctcctccctatcaagctctatccaggtggatctgctcagccaaggtaggctttttaattctttattttagagacagcgtgtcattttgttgcccagaagggagtgaagtggtgcaatcatagcttactgcagcctcaacctcctgggcttaaatgagtctcctgccttagcctccacagcagctggaactacaggtgcgtgccactgtgctcagctaattttttttttttttgaaatggagtctcactcactctgtcgcccaggcagtgtgtcgcccaggcagtgagtacagtggtgtgatcttgcctcactgttacctccatctcccgggttcaagtgattctcctgcttagcctcccaagtagctgggattacaggtatgcaccaccccacatggctaatttttgtatttttagtagagatggggttttgccacgttggccaggctggtctcgaactcctggcctcaagtgatctgcctgcctcagcttcccaaagtgttgggattacaggtgtcagcaactgtgcctggcctaattttaaattttttgtaaagatgtggtctcgaacccctagcctcaagcgatcctcccacctccacctcctaaagtgctgggattacaggcgtgagccactgcatccggcctcctgcacttcttccttaagcacatgctcacccagtgcttccattcatgcatgggaccagcactcattaagcacttactgtatgtacctgacctctgagtatccaacaggcatttttctcatttaatccttgaaatgaccctactgtcattgtacctatattatagccagagaaacagaggcacagaccagcaaaaccacttacctaaggtgactcagtcaatgccaggcagggctgggatttgtaggttttttttgttgtttgagacggagtcttgccctgtcacccaggctggagtgcagtggtgctatctcagctcactgcaacctccacctcccgggttcaagcgattctcgtgccccagcctctcaagtagctgggattacaggtgtgcaccaccatgcctggctgattttttgtttgtttgttttcttttgttttgagtcagagtttcactcttgttgcccaggctggagtgcagtggcgcgatctcggctcactgcaacctccgcctcccaggttcctgtgattctcctgcctcagcctcccgagtagctgggattacaggcatgcgccaacatgcccagctaattttttatatttttagtagagacagggtttctccatgttggtcagcctggtctcgaactcccaacctcaggagatctgcccgccttggctcccaaaatgctgagattacaggcatgaaccaccacgcctggctttttttctttttttttttttttgagatggagttttgctctgtcaccaggctggagtgcagtggcgcgatcttggcccactgcaacctccgcctcctgggttcaagcaattctcctgcctcagcttcccaagtagctgggactataggcgcatgccaccacacccgactaattttttgtattttagtagagacgggggtttcaccatgttggccaggatggtctcaatctcgtgaccttgtgatctgcccacctcggcctcccaaatgatttttgtatttttagtagaaacggggtttcaccatgttggccaggctggtcttgaactcctgaccccaagtgacttgcccgcttcagtctcctaaagtcctgggattacaggcatgagctactgctgaccccagggctgggatttgaacccacgcagtttctataccagccctggggtcttcattgacattcagcttatgcatccaatgtgttaattctctcacttccaaacagatgggcgtttccaagtgcccagagaccctggcaggtttacatctcttggctttatccagaaggtggtttggtcttcaaggccgggcacggtggcgcacacctgtaatcctagcactttgggaggccaggcaggcggatcaccagaggtcaggagtttcagaccagcctgaccaccatggagaaaccctgtttctactaaaaatacaaaattagccgggcgtggtggcacatgcctgtaatcccagctactcaggaggctgaggcaggagaatcgcttgaacccaggaggcagaggttgtggtgaatcaagatcgcgccattgtactccggcctgggaaacaagagcaaaactccgtctcaaaaaaaaaaaaagaaaagaagagaacagaaggtggtttggtctttctcagctgcgctgatgaacaggcccatttcttgtcctcagagatagggtctagcgtagcaggggagtcaaggcaggtatcactcaactgaaatccacaggaactactcaaccctgtgtaagagcacctgggatgtgttaactctgcctgggagagatttggaaaggcaggaaggactctttttgttcgtctttgttggtttttgtttttttttttttggattgttgtttgttttgagacagagtcttgctctgtcgtacaggctggagtgcagtggtgagatgttggttcactgcaacctctgcctttccggcaattctcctgcctcagcctcctgagtatatgagattacaagtgcctgtcaccatgcctggctaatttttgtatttttagtagagacggggtttcaccatgttggccaggctggtcttgaactcctgacctcaagtgatccgcctgccttggccccccaaagtgctaagattataggcgtaagccaccacagctggcccatctttgtattctgagccagctaaacacacaaaggccagactggggcagggcatggtggctcatgcctgtaatcccaccatttcagcaggccaaagtgggaggattgcttgaggattgcttcaagaccagcttgggcaacatagcgagacccaatctcttaaaaaataacaaaaaattagctggatgtggtggcacacacctgtagtctcagctactccagaggctgaggcaggaggattccttgagcctgggagattgttagcctgggtgacggaatgaggccttgtctcttaaaaaaaaaaaaaaaaaaaggccgggcgcagtggctcatgcctgtaatcccagcactttgggaggccaaggtgggtggatcaccaggtcaggagatcgagaccatcctggccaacatggtgaaaccccgtctctactacaaataaaaaattagctgggtgtggtgttgtgtgcctgtaatcccagctactcgggaggctgaggcaggagaatcgcttgaaccaggtagtcggaggttgcagtgagccgagatcgcgccactgcacttcagcctggtgacagagcgagacatcatctaaaaaaaaaaaaaaaaaaatgccaaagtgggtaaatgacttgccgcaggtcacacagcctggaagtccgaaggagcctttgcaagaaatcttgctgctttcaaccctccttgttagtctcccaggctgctgtaaggaagtgctacccattgggtggcttaaagcaacagagatttattctcttccacacctggaggccagaagcctggaatcaaggtgttgacaggaccatgttccctctgaaacttgcaagggagactccttccttgcccctgcctggccagcgggcattggtggtggccagcaatgctgggtgctccttggcttgtagatgatgcatctctccaatctctgcatcatccagtctctgcctcctccatcacatggactctccctcgtgtacttgtgtctattctcttcttaccaagacactggtcgtattggctgggcgcagtggctcacgcccgtaatcccagcactttgggaggctgaggcgggcggatcacttgaggtcaggagttcgagacctgaggcaagttgcaatttttagccccattttatagatgaagccactgagtcttggataataacatgctcattcttcctggaaccacccagaagacttctgctggagtcttattggccggaagagtgtcacacagccatctctagaaggaagggagttgggaggctgaggtaggcggatcacttgaggtcaggagtttgagatcagcctggccaacatgacgaaaccccgtctctactaaaaatacaaaaaattagccgggcatggtggtgggtgcctgtaatcccagctactcgggaggctgaggtaggagagtagcttgaacctgggaggcggaggttgcagtgagctgagattgcaccactgtcctccagcctgggtaacagagtgagactctgtccccaaaaataaataaataaataaataaataaataaaatagaagcaagcgggacttgaaggctggaataatggcaaggggagctggaagaggggctggaagacaaaaaaaatacataaacacataaataaataaaatagaagcaaggggggctggagggcaaggattaggcagggcacactgacacttaaggagccctgtgttagcaaaggaaagagataggtgtgaatttgacaaactgtgtctcccacaattctccctgcctctgaatctggatgaagtatattgagtgcccgctaaggactaagcactatgctacagactcacggcaaattattccttttttttttttgagatgaagttttgctcttgttgcccaggatggagtgcaatggcacgatctcggttcactacaacctctgcctcccaggttcaagcaattctcctgtctcagcctcatgagtagctgggattacaggtgcacaccaccatgcccggctaatttttgtatttttagtagaggtggagtttcaccatgttgaccagactggtcttgaactcttgacctcaggagatctgcccacctcggcctcccaaagtgttgggattacaggcgtgagccactgcacccagccttcaaggcaaattcttttttttttccccctgagatggagtttcactctgtcatccaggctggagtccagtggtgtgatctcagctcactgcaacctctgcctcctgggttcaagcgattttcctgccttagcctcccgagtagctgggattacaggtacacgccaccacgcccagctaagtttttgtatttttagtagagacagggtttcaccatgttggccaggcggtctcaaactcctgacctcagtgatctgcccaccttggcctcccaaagtgttgggattacaggcatgagccactacgcccggccaagacctcaactcttaaataaataaataaataaagccaataccatccctgcagagttagctttcaggagggcttatattctagttgctgagggatggggtggctcagaaataatattggttatgggaataacttgtactgtggtccaggcactgctttgaggacttctcattcactaagtcaattattcattacccgctatataaggtgggttttttgtttttgtggattcttttttttttttttttttttgagatggagtctcgctctgttgcccaggctggagtgcagtggcgcgatctcggctcactgcaagctccgcctcctgggttcatgccattctcctgcctcagcctcccgagtagctgggactacaggcgcccgccaccatgcccggctaattttttgtatttttagtagagatggggtttccccttgttagccaggatggtctcgatctcctgacctcgtgatccgcctgcctcagcctcccaaagtgctgggattacaggcgtgagccaccacaccccgccttgcagatttttttttagagactacaggtgtaagccattgtgcctggcttttttttttttttttttttttttttttggtagagacagggtcttgctatgttgcccaggctggtctcaaactcttggcctaaagggaccctcctaccttgggctcctgagtggctgggattacagactccggacactgcacccggctccaggtgggttttattaccatcctcattttataaatgaggaaaggggctcggagaagttaagtaacatgcccaatgtcacacagctaataactgtgaagccgggatttgaacccaggttcttggattcgagagcataagaccctgagttcaggtaagtaatacaatgtcagctggctgtaagacagatgatggtaaataacagggaccactaggcctggcaaggtggctcacacttgtaatcccagcactttgggaggcagaggtaggcggatcacctgaggtcaggagtttgagactagcctggccaacatggtgaaaccctgtctgtattaaaaatacaaaaattagccaggtgtggtggcatgtgcctgtggtcccagctacttgtgaggctgaggtgggagaatcgcttgaacccaagaggcggaggttgcagtgagatcacaccactgtgctctagcctgggtgacagagcgagactccatctcaaaaaaaaaaaaggccaggggcggtggctcacgcctgtaatcccagcactttgggaggccgaggcgggcggatcacgaggttaggagatcgagaccatcctggctaacacagtgaaacccagtcaatactaaaaatacaaaaaattagccgggcatggtggcgggcgcctgtagtctcagctactcgggaggtcgaggcaggagaatgccgtgaacccgggaggcggagcttgcagtgagccgagatcaggccaccgcacttcagcctgggcgacagagcaagactccgtctcaaaaaaaaaaggccggcgcggtggctcatgcctgtaatcccagcgctttggaagaccgaggcaggtggatcacctgaggtcaggagttctagaccagcctggccaacatggtgaaatccggtatctactaaaaatacaaaaattagctgggcatggtggcatgcgccggtaatcccagctactcaggaagctgcttgaacccaggaggtggaggttgcagtgagccgagattgcaccactgcactccaacctgggctacagagcaagactccgcctcaaaagaaaaaatacaaatacaaataaaataaagagaacagccagtgggaagtcccagaaatgggcacacactgggtgtgtctggggtgcagtgaggggccccctgtggctgaggcgaaagtctagggattattgcacccactttgcacgtgtgaccttccacaattcttcacacagcgactccttcacaacagtctcatgacataggtttttataattctcctctcttgacgggcggggaaactgaggctcagggtggctaattgagccacagccagaaagcaatggagctccaatctgaatccaggcagcctgcccccactgccgaactccaagggaaacacagtagggagccaatgccagcaggctgggagggctgcctggaggaggtggatgtcaccaggacctgcgggaggaccctgaggagcagggagggagggagctgccgctgaccaaggcacaaaaacatgttcctggggcagttcttggaaggcagatttccaggtgcctgcccccaatgtggccctgcctcccgctccccctggccccctcttcctagagggaaggcggcaagaggcgcttcattagcgcctctgaggccccagcagccccggggggatgaaaagggcctaggaggggagccgtcctaattttggcacacctggcagggggcccagggccactgaaagggattcagctggggccggctgggcaggccccgtcattgttccggctagatccgcggtcagggcttcaaatgcaaaatcgggctggggatggggtgggggcgccggtggcctctgctcttcctttaatagaccaaaggactctggcggcttagctctttttcctaatttaaaggtattttcaggcgtttgggagctcccctacggcgaagcaggaaggctgggaagtggggggccttgaaactctcttcgtggttgcccgcggaggatggaggaaaaggcggggaggaggggggctgaggttggtctggggtcactggtggggcgctgggcaggtggagacccgtgttgagttctcggctgtcctctgccccagtttccctctctggaacctctgtctggtttctggaaccgtccccagcaggtaggacggatgcaggtgtgcccaaacggcagtttcttcctaaggagctctttcgggtcaactccggaggccttgactagggaggcagatggaggaggcttgatccctctcagcatggcagccgtggtgccaaggcaggaaggagggtagggaggcaagccaatggggtgcagcggcctccatgccagaaaatgggggctccctggatcatctcctcggcgggagggtgcacggggaccaggagagagaaccaaaggaccccgctggaggggggcttggagcctagagacagttgagggggtactgtcttcccctctctcctggccacgctgcccggtcggcctttttctcccctttccctccccttttgcccccacccccgcctgcccccctccaggccccagcgccccccactcccaaccccccggcctgctctcctgcctcccccgtgccacctccttgggctgcgtttctcttccctcctccgagttccaggccatcccctctccccctccccagcccgccctcctccttctgactggctcccgcctccctaacgctctctcagcctcccagccccctcctccctccctctctctctccctctctccctttccttccttcatcccagcctctcttcccaccttccccagcaggagagagggggccgcgctccccccagcccctccccctctctccctggggccgccgccatcttgcaggatgctggggagggagccgcgtgcaggccatggaaacaatgcatcttttatgaagcgatccccgctcctcgcctggaaaccttgcattaatgcggcattgatttccctcgtaatagagggggctctcccgcgcccccaacccgaggggcgcaagaagggagggggccagtttcgggggcgaggagggaaaagtggagggtgatggagtcatcgctccgggctcccagctctgcagccggcgccctccccgcgccccgcctggagacccccaccccaccccgcaggtggaggttcccagagtgggggaggggttccggcgcgaggccctctagtaacttctgggctgagacccagccacagagtcccggccgatgggatccccacccccctattctcagccctggcattggccagaaagggcgcaggagaccctcggctgcccctggggcccgctgtctgcggccaggtcctctgggacacgtgtccccccctccccccagaaccctccgaggttccccagctcctccaagccctgtttccttcccctcttccatcttgccgcctcactcccatccttacagctcctgccttcctcgtcctctcctggctccccccttccccttccctgctgcctgccccctccctccacacccccttccctgcgtgctaatggcccggtggcaggcggctccgtggctgtttccgggggaggcgggtttgcagccaggggagatgttggagcggtttgaggaagaagaattatacatacataaatctgggataatgacggtgttgctaatggggcgggcggcggcagctcccggcagtgcccccccacaaacacacaccccatcacacacactcagggaccagcctggcttcctgacgcgtttgagggtccgtgggccccgatcatctccttgactggccctgaaacatccctgctgcagatacggggtccatgctcatttgtgacatcaatgaaacatccccctccagccccccaattcaatttgcggcttgccactttgcttgccctgtggcctaggggtgagtagttaccccagcaggacaggtgtgttcacttgggtcttattaccccaccaccagcctggaccccccactcctctaggttttctgaggtcacaccacccaccacatgacatcttttgcataactgaaggaaggtcagacggattttcttaccctttctccatttcatagctgtgtgaccttaggcaaattacttaacctctctgagattcagttctctctacttgtaatttgggaataattatgttcaaagaacctgaggctgaggtgggaggatcacttgaggcaaggagttggagaccagcctgggcaacatagcgaaacccctgtctcaaattaaaaaaaaaatttttttgaaaaaattagtcaagggccaggcacagtggctcacacctgtaatcccagcactttgggaggccaaggcaggtggatcacttgaggtcaggagttcaagaccagcctggccaacatggcgaaaccctgtctctactaaaaaaaaaaaaagtacaaaaattagccggtgtggtggtgcatgcctgtcatcccagctactcgggaggctgaggcacgagaatcccttgaaccgggaggcggaggttgcagtgagcggaggtcgcaccactgcactccagcctgggcaacagagcaagaccctgtccctaaaaaaaaaaaaaaaagagaacgtgaattcacccacttctttccacttttgtgcttcccaactccttcatcacttgcctggatttactgaggttgccttggccacaggctcctggcttctgccctggcctccatccgtccttaccacagcccagaggtatctttgaaaagacaaggaagttcacgttttccttctattgagaacgctgcaatgcaccgccatggctcttagattaagaccgaaatccctcactcaacctccttgggattcctctctccatcgctaagtccactccagctacactgagcctttgcactggttgttcccacttcctgcaacacccttccccctagatctcacatggccaaccagctctgccttcttcttcacgcctcagctccatgtcaccacccctagtcaatctccattaactctctgatatcgcttacttatttgttttcatgaccattccctcctggaataacatctctctctctctctctcttttccttccttcctttttccctccctccttccttcctttcttgcttccttccttttttgttttttttgacagagtctcgctctgaacacccaggctggagtgcaaaggcacgatcttggctcattgcaacctctgcgattctcctgcctcagcctccccagtaggtgggattacaggcatggctgtacactcagctaaattttgtgattttagtagagacagggtttcaccatgttggccagggtggtcttgaactcctgacctcaggtgatccgcccgcctcagcctctcaaagtgctgggattacaggcatgagccactgagccaagctgtttctttcttttttgagatggtgtctcactctatcacccaggctggggtgcagcagcgtgatctcggctcactgtaacctccaccgtgttcaagtgattctcctgcctcagcctcccaagtagctgggacaataggcaggtgccaccattcccggctaatctttgtatttttaatagagacaggttttcaccatgttggccaggctggtcttgaactcctgacctcaagtgatctgtttgtctcggcctcaagtgatctgttcatctcggcctcccaaagtgctgggattacaggtgtgagccaccgcacctggccaaaatttataaaccttgactcttattctcggtgtgtcccacaatacctggcacctactagattttcaaatatgtgttgactgagtgaattaaataaataacgttgtgactatgtaaggatataagtgatgtaaagttcttggcaggtcaccagcattcaataaaccaagatgctgggcacagtggctcacgcctgtaaccccagcatgttgggaggccaaggcaggaggatagtttgaaccaggggttcaagagcagcctggacaacaaagcgagaccctgtctctacaaaaattacaaaaaaattagctgggtgtgatagtgtatacctgtggtcccagctattcgagaggctgaggtgggaggatcacttgagcctgggcggttgaggctgcagtgagccaggttcctgcgatccagcctgagttactgagtgagaccctgtccacatccccacaagaggtaaacttatgttcatcaaaagacatgtacaaggatgttcatagctgctttatctacaataaccattcactgcaaacaactcaaatatctatcagcagtaagataaatacattgtgatacatctccacaatggattattatacaaccaagaaaaagaacaggaaagcagacatgacaatagattctcacagatacaatgttgcgtaaaagcaagacgacaaaccatgtatttccacttacacaaagttcaggggtaggcaaaactaatctatgatgaaaatgtcaaattggaggatactgactgagaaagagcatttgggaatttcctggagggacaattatgttcttctggtctgcatggtggatacacaggtatacacgtgtagaaattcaccacgctgaaatttatgatttgtgcactttaccatattcattaaaaaaaaaaaaaaaaaaaggaagccagtcatgatggcttgtgcctgtaatccaagctactcaggaggctgagatgagaggatcgcttgaggccaggagctcgagaccagctgggtaatgtagtgagaccctgtcttcatttaaaaaaaaaaaaaaaaaaaagattaggctgggtgcagtggctgtaatcccagcactttgggaggccaaggtgagcagatcacttgaggtcatgagttcgagacttgccttgccaacatggtgaagccctgtctctactaaaaatataaaaattagccaggttaggccagggatagtggcttacgcctgtaatcccagcattttggaggccgaggtgggcggattataaggtcaggagtttgagaccagccaatatggtgaaactccgtctctactaaaaatacaaaaattagtcaggtgtggtggtaggcgcctgcctgtagtcccagctactcgggaggctgaggcagaagaattgcttgaacccgggaagcagagattgccgtaagctgagatcgcgccattgcactccagcctgggcgacagaggaagactccgtctcaaaaagaaaaaaaagttagccaggcattgtggaggttacctgtaatcgcagctcctcaggaggctgaggcaggagaatcacttgaacctgggaggtggaggttgcagtgagccaaggtcacaccactccactacagcctgggtgacagagcgagactccatctcaaaataataatcataataataatgaaaagaaatgatgctggatgcagtggctcatgcctataatcccaacactttgggaggccaaagcaagaggatcacttgaagccaggagtttgagaccagcctgggcaatgtagcaggaccctatctctacaaaaacatatatattttaaaaattagccaggtgtggtggtgcatgtctgtagtcccagctactcgcatggctgaggcaggaggatcacctcagtccagtaatttgaggctgcagtaaggtgtgatcacaccactggactccagcctgggcaatagagcaagaccctatctcaaaataaaagaataaaatatacaataaaaataaaacagagcaaagagaatgtcccctagagccatgtgtgatccatacgctttgtgaatcctgacacctcctctccttcgaggttgtacaactgtcttccaaagttggaaaaaaaaaatgtttaaagctgcccagattcaggagggaggtccaaggggtaccagtgccctcccccatttcccaaggacgacaagggttgccagcctcccttggccttggggtgtgcgcagctcggcgtgagggccagtggttgatcttgaagtttctttcctactccctcatccctttcctgcccaagctgtggtcccagctgactcccctatcagcgactgcgagtgagttcggttgttatggcaacggggctgcggagatccccgggaacctgctggtccgcctcattgcctcaccgtatggggagctgcttttcccccttaaaaatgaaacgggagtgggatgggggaggaacccccttcttctgctctggaatgaaatgcctccctcacctgctttgtcccaaacccccggtttggagaggagggtctggatgggacccagactgtggataaggatggagggaggagaactcctgctccctgggttttagcagccttcccaggtcccaccgaacacgaggaacacggtctttctccagctccaacttttctcatctgtccattcattttttccacaggaggcatgaggaggtgagagatggaaagaatgctgcctgtcatttggagtcagaaggaaaagaaggttgagggtctggcagctttgctctagtggttttttcctgtttcaccttttacaaaatcgagataattgtttctacttggtagcgatattgtgaggtgtaaaatggattaacacatgcaaaatgcttaaagcaacttctggcatatggcatatggtgatctctcaaccaatcgattgttattttattattatttttttgagacggagttttgctcttgttacccaggctggagtgcaatggtgtgatctcggctcactgcaacctctgtttcccggattcaagcgattttcctccttctccaggtgtccaccaccacgcccagctaattttttgttgttttttgttttgttttgttttgtttgtttgagacagagtctcgctctgttgcccaggttggagtgcagtggcgcgatctcggctcactgcaagctctgtctcccaggttcatgccattctcctggctcagcctccccagtagctgggactacaggcgcccgccatcacgcctggctaatttttgtatttttagtagagatggggtttcaccgtgttagccaggatggtctccatctcctgacctcgtgatccgcccacctcggcctcccaaagtgctgggattacaggcgtgagccaccacgcctggacaattttttgtatttttagtagagacggggtttcaccatgtcagccaggctggtctcaaactcctgacctcaggtgatccacccgcctcagcctcccaaagtgctggaattacaggcgtgaaccaccgtgcccagcagggagaccctgtttctacaagaaaaaatttactgtgatcccagcactttggaaggccaaggtgggaggatcacttgagcctaggagttcaagtccagcctgggcaacatacatagggagaacccatctcttaaaaaaagaaaagaagaagaaagaagaaagaagaagaagaagaagaagaagaagaaagaaaaagaaataattacatgtaaccctaccagcagttttgtgggattgctatgatcatacccatttcacagattaggtaactgaggttttagtgccctggagatgaaggcattctctagtctcccagaagccctggactcttgaacaaccccaaatgctaaactcagcagtaaaatggctggtggctcctacctgagggttcacagaggggctgcctgtgcttgtctcccagccctttcttcctgtgtattaagagggttgcagctacttcagggccagcgtctccacaagtcatcatgacggcttcctgatcatggctctctctctctcttttttttttttaagacgaagtctcgctctgtcgcccaggctggagtgcagtggcatgatctcggctcactgcaagctccgcctcctgggttcacgccattctcctgcctcagcctcctgagtagccaggattataggcctgcgccactgtggccagctagtttttttgtatttttagtaaagatggggtttcactgtgttggtcagggtggtctcgaactcctgacctcaaatgatccacctgccttggcctcccaaagtgttgggattacaggtgtgagccactgcgcctggcctggagatctgtttgtcatattggtgaacacttttaaacaaccagatcttgtgagaactcactcactatcacaagcacagcaagggaggcctctgaccccatgatccaatcacctcccaccaggcccttcctccaacaccagggattacaattcaacataagatttgggtgggggggatacaaatccaaaccatatcacaggacctgtgttcccacctcctaaacctgggtgggacttgtgactgctccaaccaatggagtatgaaggaattgagtcaatgaggttttgaaggttgagtcatagaagatggctttcacctggcctgtctttctccctctctctctctctctttcttccctccctccctccctccctcactcccttccttccttcttccctcccttcctcacttcctctctctctccctccctccctctctctttctcccttccctcgcctcccctcgcctcccctcccctcctcttcctttcttcctttcttccctgcttgcttgcttgcttgctcgctctgctgcccaggctggagtgcggtggtgccatcatagctcactgcagcctcaaactcctgggcacaagtgatcctccccagcctccccagtgcctgagactacaggcacatggtgcctcatctgcctgatttttaaattttttgtagaaatggggtcttgtggcagacgtggtggctcacgcttgtaatcccagcactttgggaggctgaggcaggtggatcacctgaggtcaggagtttgagaccagcctggctaacatggtgaaaccctgtctctactaaaaatacaaaaattagttggcaggggtggtgggcgcctgtaatcccagctacttgggaggctgaagcaggagaatcgcttgaacccgggaggcggaggttgcagtgagttgagattgtgccactgcactcctgcctgggcaacaagagtgaaactccgtctcaaaaaaaaaattttttttttttgtagagatgggcgtctccttatgttgcccagactggtcttgaactttgagcttcaaatcctgcctcagcctctagagtagctggaattgtaggcaagagccactctgtctggtggtttttaacagttttttttttttttttttttaagagacagggtctcaccaggcgcagtggctcacgcctgtaatcccagcactttgggaggccaaggcaggtggatcacctgagatcaggagttcgagaccagcctgaccaatatggtgaaaccctgtctctactaaaaatacaaaaattagctgggcgttgtggcatgcacctgtagtcccagctactctggaggctgagacaggagaatcgcttgaacctgggaggcagaggttgtggtgagccaagattgcaccactgcgctctagcctgggcaacagcaagactccatctcaaaaaaaaaaaaaaaaagagagacagggtctcaatttattgcgcaggctggagtgcagtggtgcaatcatagctgcagtcatagctcactacagcctcaaactcctgggctcaaggatcctcccagctcttctaaaatattagccggagggtgggtagcatgtaccaactcttgggcttagtaatcctcctgcctcagacttccaaatcgctgggattacaggtgtgaaccactgcacctggccctcttgtttctaaggatatcagtcattggatttagggcctaccctaaaatccaagatgttctgatagtgagatctttaacttaattccatctgcaaagaccctatttccaaataaggccacattcacagataccaaaggttacacatttcttctttcttcttctttcctcctcctcctccccttcccttccttttttttttttttttttttttgagacggagtctcgctctgtcgcccaggctggagtgcagtggcacaatcttggttcactgcaagctctgcctcccgggttcacgccattctcctgcctcagcctccacaatagctgggaatacaggcgcccgccaccatgcctggctaattttttgtattttttagtagagatgaggtttcatcatgttagccaggatggtctcgatctcctgacctcgtgatccgcctgcctcggcctcccaaagtgctgggattacaggcgtgagccaccgcgcccggccccctttcttcttctttcttcttttttccttcccctttcccttctcctcctcccccgcctccctccccttccctttcatcttctttcttccttccccttcttcttctcctccccctccccttccctttgttcttcttctttcttctttcttcctttcccttccccctgctcctcctcctgctcttcttctcttttcttctttcttttcaggctcttaccctgttgcctaggctagagtgcagtggcacaatcatgtctcactgcagccttgacctcccgggctcaggtgatcctcctgcctcagcctcccaagtagctgggactacaggcatgtatcaccacacctggctaatttttaaaatttttttgtagagatggggtattgctatattgcccaggctggtcttgaactcctggactcaaaggatcctcctgcctcaggctcccaaagtgctgggattacaggcgtgagccaccgggcccggcccatacatatctgctttggggccacaattcaacctgctacaatcacaatagatgttgtgatttttccacctctttctctttttttggacttgtttttcatagtctggggcataattcatttaaaccattttctttgattgatgaaccgtacattgttgccaactctttgttctttcctagttttttgtctgcactgtattgtactggagaacaaatatttctccaagaagtgttcccactggtggaaggacaggctggtttttggtttttgggtgttttttgagacggagtttcactcttgtcacccaggctggagtgcaatggcatgagctcagcccactgcaacctctgcctctcgggtttaaatgattctcctgcctcagcctcccgagtagctgggattataggcgcctgccgccatacccggctaatttttgtatttttggtagagacggagtttcatcatgttggccaggctggtctcaaactcctgacctcaggtgatccgccggccttggcttcccagagtgctggaattacgggtgtgagccatctcatccggctgatgggctggtttggttttttgttgttgttgttgttgttgttgttgagacagagtcttgctctgtcaccaggctggagtgcagtggcgtgatcttagctaactgcaacctccgcctcctgggttcaagtgattctcctgcctcagcctcccaagtagctggaactacaggtgtgcgccaccacacccagctaatttttgtattttttaagtagagacgggtttcaccatgttggccaggatggtctcaatttcttgacctcaggatctgcccaccttggcctcccaaagtgctgagattatgggtgtgagccaccgcgcccggccgatgggctgtttttgtgttctgggttgggtaggataagatagttcccacttggctttctagatccacttttcacgcgcctctacttggctctggttctttggacagatctggggttccctggtcctctgccttccatctggggtcagacaactgagaggagatggatggcaggacgggagtgaattcagcttcaagcctgtcctgagaacaggtcactcacctgacccagagccatggtttctggggatggcaacatctgcccagtgtcccagggtgctagggttgtgattgaagccttttaaaatttttatgtatttagttagttattgtttgtttgttagtttgttattgacacagagtctcaccctgtcacccaggctggagtgcagcagcaaaatcatggctcactgcagcctcaacctcctgggctcaggcgatcctcccacctcagcctcccgagtagctgggagtacaggtgcaggtcaccacacccagctaattttttaatttgtttctagagacggggtattgccacatccaggctggtcttgaactcctggactcaaggagtgatccgcccgcctcggcctcccagagtgctgagattataggagtgagccactgtgccggcctttgaagcttttcctgcaaattctcttatctttatgacagacctcagtcacccactgtgattgcaggatgcttcccatggggatcgtaaccaaaaagcattcttctccaggagcttttcctgatagcaaatgcgttagattttgggaacatctaaaaataactttttcttcttttttgttattataggcaggaaatacgctatgtgtaaaccagaagactataaagatctccacatttccagccctgaggaaaccactgctgatctttaggtgtctatcctttttgtcttttttttttttttgagatggtgtcttgctctgttgcccaggctggagtgtagtggcgtgatctccgctcaccgcaacctccgccccccaggttcaagtgattctcctgcctcagcctcccgagtagctgggattacaggcgcctgccaccatgcctggatactttttccatttttagtagagacggggtttcaccatgttggccaggctggtctcgaacgcctgacctcaggtgatccacccgcctcgggctcccaaagtgctgggattacatgtgccaccatgcccacccttctttttttgttttttgtttttttgttgttgttcttgttgtttctaagacggagtctccctgtctgtcacccaggctggagtgcagtggcgtgatcttggctcaccacaacttctgcctcccggattcaagcaattctcctacctccgcctcccaagtagctgggactacaggcgactgccaccacagctaatttttgtatttttaatagagatggagtttcaccatattggtcaggatggtctcgatctcctgacctcgtggtctgcccgcctcagcctcccaaagtgctaagattacaggcgtgagccaccgcgcctggccattttttttgtttgttttttgttttttttgagacagagtctcccactgtcgcccaggccggagtgcaatggtgccatcgcggttcattgcaagctccgcctcctgggttgacaccattttcctgcctcagtctccctagtagctgggactacaggcacccgccaccacgcctggctaattttttttgtacttttagtagagatggggtttcaccatgttagccaggatggtctctgtctcctgacctcgtgatccgcctgcctcggcctcccaaagtgctgggattacaggcgtgagccaccgcgcctggccccccccttctttttttttttgagatggggtcttgctctgttgcccaggctgggatgcagtggtgtgatctcggctcactgcagcctccatcttccgggttcaagggattctcctgcctcagcctcctgagtagctgagattacaagggcgtgccaccacacctggctattttttgcattttttgtagagacgggtttcactatgctggccagactggtcttgaactcctgacctcaggtgatctgcctgcctcagcctcccaaagtgctgggattacaagcctgagctgctgcagccagcctccctcttgtctttctcaggacagggctctgggatcagacagagccgggcctgaatgcctgcctgaccacgatatgctctgtgagcttgggcaagtgtctcaacctctctgagcttcagtttcctcatttataaatggtgtaagcatagtgccaactttgtcagattgctgggtgtaaatgccctgaggttgataaatgtcggttcctactatgtcaccaggctggagtgcagtggtgttatagctaactgcagccccaaactcttgggctcagacgatcctccccgtcagcctccctagtagtagtatgccatgactgtctaatttttttttttttttgagatggcgtctcgctctgtcacccaggctggagtgcactggcgcaatctcagctcactgcaagctccgcctcctaggttcacgccattctcctgcctcagcctcccaagtagctgggactacaggcgcccgccactacgcccggctaatttttttgtattttttagtagagacagggtttcaccgtgttagccaggatggtctcaatctcctgaccttgtgatctgcctgcctcggcctcccaaagtgctgggattacaggcatgagccaccgcgtccagccatgcctggctaattttttaaaaggtttgttttagagacggggtctcgctttgttgcccaggctggtctcgaactcctggtatcaagtgatcctcctcctcagcccctcaagtatctgggattacaggcacaagccaccaccccggctacaggaatgttatataacagatgttcaaattcttcttcaggctttctatagataacaggatttcagcccctcttctatgtgacccaggccaagttttggtcttgttccacagtcctagaacctgccgtgtttttttgttttgtttttttttttttgagacggagtctcgttctgtcgcccaggctggagcgcagtggcacgatctcggctcactgcaagctccgccccccgagttcacacagttctcctgcctcagcctccgagtagctgggactacaggcacccgccactatgcctggctaatttttttgtatttttaatagagacggggtttcatacctgccattggtttttaagatcttatgtctgggccaggaatggtgactcacacatgtaatcccagcactttgggaggccaaggtgggtggatcactggaggtcaagagtttgagaccagcctcgccaacatggtgaaacctcatctctacttaaaatacaaaaagtagctgggcaaggtggtgcacgcctgtaatcccagctacttggcaaactggggcatgagaatcacttgaacccgggagttggaggttgcagtaagctgagatcatgccactgcactccagcctgggcaagagagggagaccctgttgaaaaaaaaaatttaaggccgggtgcggtggctcacgcctgtaatcccagcactctgggagcctgaggcaggtggatcacctgaggtcaggagttcaagaccagcctggccaacataatgaaacccgtctctactaaaagtacaaaaattagctaggcatggtggcgcgtgcctgtaatcccagctacttaggaggctgaggcaggagaattgcttgaacccaggaggcggaggttgcagtgagccgatattgagccattgcactccagcctgggcaacaagatcgagactccgtctcaaaaaataaataaataaataataaatgtaagtgagaccaggtagactggtgcatgcctataatcccagcactttgggagactgaggtgggaagatggcttgagcccaggagtccaaggctgcagtgagctatgaccgtgccactgcactccagcctgggccacagaatgatagacaccttatctcttacagaaaaaaaaaaaaaatcaagtgaatgtttcattgagtgcttactaagttccatgcacaaaggctaaacaccttgacagacactattttctataacagtcacaagaacccatttgaaagaaaggagggctgggcgcggtggctcacgcctataatcccaacactttggaaggctgaggcaggcggatcacttgaggtcaggagttccagaccagcctggccaacaaggtgaaacccggtctctaccaaaaatacaaaaattagctgggggtggtggctggcgcctgtaatcccagctactcggaaagctgaggcaggagaatcgcttgaacctgggaggtggaggttgctgtgagcggagatcgtgccactgcactctagcctgggcaacagagcaagactctgtctcaaaaaagaaaaaaaaagagaaagaaagaaaggaaggaggatcaaggcactgcaagtaagtggaggaggaggcaagatttcactccatcctttgccgtgagtactgtcggtatatccccctaagttgtgccttgtctccatttgacatcaccaagcttgttattattgtgtctaaaccacaagcaaattggctataagtgagggccacaaccatcagttcaacttgaccagaatatagtaaccacccaccacatgctagaccttatacttgtcaaggaaaaacagctcagatctcccaccttcctggagcttataagacttcggggtcacctcctttagcttatgcatagacttttattttattattatttattttcgagacagggtctcgctctgttacccaggctggaatacagtggtgtgatcttggctcactgcagcctcaacctcctgggctcaagtgattctcctgcctcagcctcccaagtagctgggaccacaggcatgcgccaccacacctggctactttttgtatttttagtagagatggggtttcaccatgttgcccaggctggtctcaaattcctgacctcaagggatctgccctccttggcctcccaaagtgctgggattactttccaggtgtgagccaccgcgcccggcctgcgcagacctttaaatatgcgcttcagttcttagagagttttaactgcactggatgctaagttgagtttcagataaaggtgtcagaacaatggctgggggacaataaggtgctgttactggtgatgccttgtctcgggagggagcaattttgggagtgggaaggggacaaaagaaactgtagtccctagggataagggctgaagccctggtccccaaatgcttgcatttggatcccagattcattatttacttgtggtgtgaccttggacaaggcctctcattgtcccgtgcctcagtttctccatctgtaaagtagacctggtcttagtaacctgctgcctagaactgtggtgcgaactgagggagctatgcaaagctttagacagtgactggttggcggcaagcaatcaatcaatgaagcctccatcacagtgatcccttgggctccccagggagtagcagtttggaggacccagattctgaacccacagagttggtgtggaagaggaagagggagcctggtgagccccccacttacacccccagaagccttggagccaaagcagccggaccccagccccagcttcagaggagctgccttgggggtggggctgccccggggctggcccagccccagcaagcttgttaattacttctcagggtcacggtcttaaggagcccctccgaggggatctttgcccagccctctgtttattgatcgcatctaatctctccgcaggcgggcgggcctctaaatcctgcttaactctcggttcctgccctttccgggcagggaggcccccgggctgggtttagctcgcagcgaatgagggctggaaaactggagcgcattgggagacctctagggcccccctaaaacagagaagggatggtgggttccccccccacccacaagcatctcgggactcccaacacctacccacctgtgggcgaggacaccgctcgtttttgcccctcccaatccccgatcttggaatccacttcttgtggctccagaatccaggtagacggcccccacttccccctcggccagccctggcctcccttggtccccatcaggggaaggaggatttgggagctggggagccgccctgacttgctgttctcctttccttaaagaaaccagcgccgctggagggagtggagcccctggcccccggcctggctcggctctttgccgaggtgattaggatgcgtcctccgagggcgcacggctttaacccgagttgccagcgcttttcgggccccgggcgatgtcggttgttcagggggctctctgggtgcctggctggcctccgttcccacctttgaagtgagctctggttggatggtgggaggagcgggggcgaggcggggtgttctgctgggccgggtctgggaggaattcgcgggaaatgcgggggcttaatgggggaaacagaggcagtatcaaatagacggcctgctgacatttttaaaaatgtttttacaatttttgtttgtttattttttttgaaaccaggccttgctctgttgcccaggctggagtgcggtggcgtgatcatagctcactgcagccttgaagtcctaggctcaggtgagcctcccaccttggcctcctgagtagctgggactacaggtgcatgccaccacgctatgctaaattttgttttctttctcggtagagaaggggtctcactatgttgcccaggctgtggcaggctgagcatgagtggctcatacctgtaatctcagcacttttgggaggctgaggcaggattgcttgagtccaggagtttgagaccagcctgggcaacatagtgagaccctgtctctacaaaaaaaaaaaaaaaaaaaaaggcaggtatggtggcacacccctagtcccagctactcggggagctgaggtagtaggatcacttgagcccaggagttttgagtctgcagtgagctatgatcgtgccactgcactccagcccgggcaacagagtgagaccctttctcaaaataataataataacaataaaatataaaataaaataagaaacaaaaacttggaagacagagcagcctaggttcgaatcctgcctccaccacccagcactgggagatcctgagtgagtgactttgcttcttggagctctctcctcgcctctgacttctcagctgctctgggtcaggaactgaatgactaaaagggcctggttcagaatgagtgctcctcctggccaagagaggaggaggaaggacaggggtgggtgggacagctgtagggatccgggctggtgggttggggaggttgccggctcctaccttttagagctcccaggctgtagaccaaaactgacatgaatacctgctcttgcccagcggatgtggatgcccagggggtctctgggtggggaagaagtgggtgtctattggcccagtggtaaaaggtctaagtaaaggatctgggtcttcagtttatatttccctaggaatgtgtgatggagcgctatgaccagacatgagtgtggtcagagatcagaaccaggcaccagtgtgccctgacctgtgcctcagtggttgcacattcctggtgcacacctggtgtatacctggcacacagcacatacctggtgcacacctggcatatacgtggcacatgcctgccacattcctggtgcacaccgggagtatacctggcacacacctgccacattcctggtgcacacctagcgtatacctagcacacacctgccacattcctggtgcacacctggagtatacctggcacacgcctgccacattcctgatgtacacctggtgtacacctggcacacgcctgccacattcctggtgcacagctggtgtacacctggcacacacctgccacattcctggtgcacacctggtctatgcctggcacacacttggtgtacacatggcatatatctttcaggctttcagccactgatccatcttggtcttgctcacccagtgtcagagaggcatcaggtacctgagtgagatcacctttcttgatgaaacacaaaattgggaaccacataaagagcactcactatataccaggtgctgtcttaagtgagttaactttcattaactcattttattttcacaagatgctgttagttggacgccattcgttctgttggccagatatttcctgctcttgcctttcctgtgagcaagatagtataattgagtacccccacttctctttttcttttctttcttttttttttttttgaaacagggtctcactctgtcacccaggctgaagtgcagtggcacaatcatgatcatggttcacttcagtgcagcctctatcacccaggctcaggtgatcctcccacctcagcctcctaagtagctgggactacaggcgtgttccatcatgcccggctaattttttgtagcgatagggtctcattatgttgcccacgctggtcttgaactcctgagctcaagccttctactttcctcagcctcccaaagtggtaggattacaggcatgagccactgcaaacagccacccccatttttctaagatatggtttattttttctctctctctcctcttttgtcattccctggttccccacttcctactcagccctttagaaatacaaatataggccgggcgtggtagctcactcctgtaatcctagcattttgggaggccgaggtgggaaaattacctgaggtcgggagttcacgaccagcctggccaacatggtgaaaccccgtctcacagtggcacgcgcctgtaattccagccattcgggaggctgaggcaggagaatcgcttgaacccgggaggcggaggttgcagtgagccgacatcacgtcaccgcactctagcctgggctacagagcgaggttttgtctcaaaaaaagaaacaaacaaacgaacaaacaaaaacgaacaaaaaaccccaaatataaccttttactccttcctcccccaacgcccccttgattcaccagacactccctacagggcaagttcattaaactcctcaagagttgacagttgatttagagaccaaagcatgcctgctgcagaactctcacccatcaggaggttgcctcaagaggtaacagccaaatctacgaaactccctccatcgggagactacctcgaaaaactcccacctggggagattttggcctagtcctgtccacaaaggtgccagcagcccctagctcaaccgcccagtagataaggcaccagagctaacatgcgccccccaccctactttttcccctgccttttaaagtgctggctttctgctccaaaacggaagcagtatgtttgaaggtgggacgcctgtgcttcttcccctaagctagttttggaataaatcactttctttagaccagacctagctctcgttaattggacttcgcaagctggcaagtgactaacccacattttggttacagtagctgcacttcatgcccaccttgtgttggatgaggtcatgtgactagctctaaccaatgagctgtgagtgaaattgacaggcattattcccaaactacagcatttaattgcctgtgtgagatcccccaaagctcttacttccttccagcgtgacagcaagcaatgtttcataatgttccagaatgtggctgttccatcggagactatgatgagcagaacctccttgcaacgacccaaaatggacatgaagcctgggtgaggaataaacgttgtagttttaaggttcttgggctagtttgtttctgcagcatgacctagcctatcctaaccattacaaattacacacccctttttacaggtgaagaaactgaggcatagacaggttaatcactgttcttggtcacccagctagtaagtgacaaagtgatagagtcaaggttagaatccggacagtctgactctaaagtctctgcttgcttgctttctttttctttctttccttctttctttctttctctttctttccttttctttctttttctttttttctctttctctgtttctctctctctctctttttctctctctctctctctttctctctttcttcctttcttggcggagtttcactcttgttgcccaggctggagtgtaatggcgcgatctcagctcaccgcaacctttgcctcccaggttcaagcgattctcctgcctcagcctccccagtagctgggattacaggcatgtgccaccacgcccagctcattttgtatttttagtagagatgggatttctccatgttggtcaggctggtctcaaactcccgaactcaggtgatcctcccacctcggcctcccaaagtgctgggattacaggcatgagccaccatgcctggctttttttttttttttttttttttttttgagacggagtctcactctgtcggccaggctggagtgcagtggcacgatcttggctcactgcgacctccgcctctcaggttcaagcaattctccagcctcagactcctgagtagctgggactacaggtgcacgaagctacgcctggcttttttttttttttttttttttttttttgtattttagtagagacggggtttcaccgtgttacccaggctggtcacgaactcttgagctcaggtaatctgcccgcctcggcctcccaaagtgctgggattacaggcgttagccaccgtgcccggccccggctttttttttttttttttttttttttgaggagtctcactctgtcacccaggctggagtgcagtggcacgatcttggctcactggagcctctgcctctcgggttcaaatgattctcttgcctcagcctcccaagtagctgggattacaggcggagatcatgcccggctaatttttgtatttttagtagatggggtttcaccatgttggccaggctggtctcaaactcctgatctcaggtgatctacatacctcagcctcacaaagtgctgggattacaggcatgagccactacacccaacctctttttctatttttagagacagagtcttgctctatcactcaggctggagtgcagtggtattatcacagctcactgcagcctcaaacctttttttttatttttagagacagagtcttgctctatcactgaggctggagtgcagtggtgtgatcatggctcactgcggcctcagacttccgggttcaagcaattcctctcacctcaccctctgaagtagctaggactacaggcatgcaccaccacccctggctttctttttttttttttttttttgtagaaactaagtctcactatgttgcccaggctggtctcaaactcctggcctcaagcgatcctccagcctcagcctcccaaagtgttaggattacaggcatgagccaccaggcctggtctgctgttgtttctaaactgttatcttcggtggcggggggggtccctaaacatatggaaaattcacaaactgcaacagattctggatgaggttggcctttgctgtcctgttgcctctgataatttttttttttttttgagatggtttctcgccctgtggcccaggctggagtgcagtggcgtgatctcagctcactgcaacctccatccacctcctgggttccagcaattctcctgcctcaggctcctgagtagctgggactataggcatgagccaccacgcctggctaatttttgtatttttagtagagatggggtttcttttttcttttctttttttctttttttgtgagacggagtctcgctctgtcacccaggctggagtgcagtggcacgatcttggctcactgcaagctccaactcccaggttcacgccattctcctgcctcagcctcctaagtagctgggactacaggcgtccgctaccacgcccagctaattttttttttctatttttagtagagacggggtttcaccgtgttagccaggatggtctcgacctcgtgatccgcctgcctcaggctcccaaagtgctgggattacaggtgtgagccaccatgcccggccaagacagggcttcaccatgttagccaggctggtctcgaattcctgacctcagttgatccacctgcctcagcctcccaaagtgctgggattacaggcatgagccatctcgccctgccacccctgatcatttttggcttcttgtttctttccctcttgagcactggctctcttggttggtttctctctagcatctcccctgggggagatctaggaggctggacaagaggattgagtaacatcctcctccctctaacacccacctggaccctttagttccttcagccttacacctccaatcccctctgatctccttgccaatcccctgctctgcctacactctgatcacatgagccctaacacttcctcctaagggctggagaacaattgtttgctacagggagaaaaatcctcaagccagagagctgagccattagactcctgggtcctgaggagagcccggagctgaggtttcagaaatgtcttctcacctcttcatcccttgggctgcctcctgtcacttcccggggtctctgagtcccctctgcactcagaagctcccagggaggaccagccagacagggctcaggacacttacaggcaaacctccactcctcccgccctgaccagttaacgcgacacttattctacattaaataccaattggaccaattttctgctgtaattaaaacctctgcagacgtgttccctgctcagcagtgatgagtttattaacctccagctctgaaggaatgtgggggcaggggagagggaaggaaagaagagagttttccagattaggagattggacccagggagagggtgggtttggagctgtgctgtctcctagctgggctctgagcaagagacagatgggggtgtgtgcgaaagcattaacatctgtgtgtttgctgcctctgcagtggggacttgcaaatatctacccccaccaccctgacctgctacagaaccaggactgccctcccataatcaagtgtgttttatagccctacttcccaaattattggcaggcagcatgtcctgaatctggaaatacagcctctttcagttcaacaatctggccttgtatgggatcgtttgttacgtagcataacttaggttatctgactattacatattgtatctccacttcatagctggtgaaacaggcacatgccaccatgcccagataattttctcctctgggcaggagacagatggaggcgtgtccaaaagcattgacaactattgtgtttgccgcttctgtggtggtgacttggaagtatctgaacccccatcaccctgacctcagtttcacaacagaggcccagtttgcatacaaacctaggtgaggtcatgaagggttcatagcttgcagccatagaggctggaaatcaatgcctagtacatccctggcagctcaaggagtcagctcatttctgttcattagagatcacagaatcatcacgttctctctctctttttttttgagatggagcctcgctttgtcacctaggctagagtgcagtggcgcaatctcggttcactgcaacctccgcctccaggattcaagcgattctcctgcctcagcctcccgagtagctgggactacaggaatgtgccactacgccccgctaatttgtttgtatttcagtagagacggggtttgaccattttggccaggctagtctcaaactcctgacctcaggtgatatgcccacctcggcctcccaaaatgctaggattacaggtgtgagccgccatgcttggctattctttttttttctgagatgagatttcactgtcctccaggctggaatgcagtggggcaatcatagctcactgcagcctcaaactcttgggctcaagccatcctcggcctccagagtagccgggaccacaggtgcacaccaccatgcctggctaatatttttttttttttactgcttgtagagatgggggtctcactatgttgcccaggctggtctcaaaactcctgggctcaagcaatcctcctgcctcagcctctcaaagtgctgggattacaggcgtgagccgcagcgccccgtcctgctcatttccttttattaccaacaattctccattctttatttttaatatccccttcattcaccagggctcaactttgtcatccaacttttattgctttgtggggaggaacgcaaccaaagagacactgggaggcaatgacctcatggaacaaggaagctgtgttggacatctggaatggagttggatttccaccatggcccaaaacacttccaattcctccttctagcatgtttcgaaccctgtggccaacactgccatttgtcacctttttgaatgtgttggattatctgttagcctatctacatcttgttttcctgtgtatttcaggggctggaattctggcaactactccttgtctaagattctgttgccaggagggttacagggtggattctataaatgaggagcatcagatcgtcgtggtggctcacacctgtaatcccagtactttgggaggccaaggcaggcggatcgcttgagctcaggagttcgagaccagcctgggcaacacggtgaaagcccatctctactaaaaatacaaaaaattagcagggtgtggtggcacatgcctgtaatcccagctactttggaggctgaggcgggaggatcacttgagcctgggaggcagaggttgcaagtgagctgagatcacaccattgcactccagcctgggtgacaagagtgacactccgtctcaaaaaaaaaaaaaaaaaaaaaagagagcgagaacatgtggcctgcaaagacagaaatatttagattctgatccttgatggaaaaagttttccatcctctgctcttgacttcatttggtcattcccacaatgaataagttagttctaggatcttggagcaaacatgtctgtattagtctgttttcacaccgctataaagaactatgtgagagtgagtaatttatgaagaaaaaaggtttaattgactcacagttccgcatggctgatggggcctcaggaaacttacaatcatgacaaaaagtgaagggaaagcaaggcacatcgtacatggaggcaggggagagagagagagagagagagagagagagagaggagagagagagagagagagagagagagagagagagagagagagagagagagagagagagaggaagtgccagacgcttatcaaacaaccagatctggtgagaactcattgtcacgagaatagcaagggggaaatgctcccgtgatccaatctcctcccaccaggtccctcccctcgacacgtggggattacaattctagatgcgatttgggtggagacacagtcaaacatgtcagtgttctttctctaaggctccattttgtcctctgtaaaatggggtgagaggcccctacttaactgcacgagcttgctctgcaattaaaattgcatgtcatgggccaagggactttgaaagtgggacagctcctgcaggtgcttttggctggagtcacaggatccaaaaccccccagtaatccccacatctttcctttcttttctctctcttttcttttttctctttctctttctttcttttctttctctctttctttttctctttcttccccctctctccttcccttcccttccctccctccctcccttccttttccttttttctgagaaagagtctcgctcttatcacccaggctggagtgcagtttcgtgatcttggctcactgcaacgtctgcctcctggattcaagctgttctcctgcctcagcctcctgagtagctgggattacaagcgcccaccaccacgctcagctaatttttgtactcttagtagagatagggttttgacatgttgaccaggctggtctcgaactcctaacctcaggtgatccgcccaccttggcctcccaaagtgctgggaatacaggtgtaagctactgcgcccagcccttttctttctttcttttttttttttttttgagacagagtctcactgtgttgcccaggctggagtgcagtagtgtgttctcagctcactgcaaccttcacctcccgggttcaagctattctcctgcctcagcctcctgagtagctgggataacaggtgcctgccaccaagcccggttaatttttgtacttttagtagagacagggtttcaccatgttagccaggctggtctgaaactccttactgtcaggactctgagcccaagctaagccatcataacccctgtgacctgcacgtatacatccagacggcctgaagcaactgaagaaccacaaaaaaagtgaaatagtcaattcctgccttaactggctaatggtggatgacattccaccattgtgatttgttcctgccccaccctaactgatcaattgactttgtgacattccttctcctggacaatgagtctcaggagctccccaccgagcaccttgtgacccccgcccctgcccacaagagaaaaccccgtttaactgtaattttccactacctacccaaatcctataaaactgccccacccctttgctgactccttttttggactcagtccgcctgcacccaggtgattaaaaagctttattgcttacagaaagcctgtttggtggtctcgtcatatggacgcatgtaatactgacctcaggtgatctggctgcctcaacctcccaaagtgctgggattacaggtgtgagccactgtgtctggcccttttctttctttttagtggaaatggggtcttgccatgttggtcaggctggtctcgaactcctggcctcaagcaatcctccctcctcagcctcccaaagtgctgggattataagcatgagccactgcacccagctacctttctcagttctgccttaatgtctcacgtggctgttttccttttctcttgtgtattctttcctccccctctgtcttcttgctttttttttttttttttttttgagagagagtctcattctgtcactcagactggagtgcagtggtgtgatcttggctcattgcaacctctgcctcccatgttcaaacgattctcccacctcagcctcccaagtagttgggactacaggcgcacgcaatcatacccagctaatttttgtatttttagtagagacagggtttcaccatgttggtcaggctggtcttgaactcctgacctcaagtgatccgcccacctcagcctcccaaagtgctgggattacaggcgtgagccaccgctcccagcctctacttgctttttccttctcacacctctctcttctcttctggttccctctcccagccttctctctgcacctcctcccctgccacttgctctcttcaaactcggggatgtgagaaagttcccgcagaaattgcaatctcctctcctctcatgtggctccgagataagacagtaaaaatccgattttcagcaatttgcttcatttgtgagctctccggagtctccctttctccccctgacataagcttagcaaaattgcctgggtggagtggatatttttaaccacttagtagtcagagcgggttcagaaagttttgcaagaaaccgggccaggccctgtgcctggggttgctggcgggtttggggctggagggaagcacgtggggtggcctcaaagggtttagtggaggggcatttaagaagaggatgtccgccggccatggtggctcaagcctgtaatcccagtgagaggtgacagtgtgctggcagccctcgcagccctcgctcgctctcggcgcctcctgggcctcaggcgcccactctagccgcgcttgaggggcccttcagcctgcggctgcaatgtgggaacccctctctgggttggctgaggccggagccagctccctcagcttgtggggaggtgcggactggtggaaaccagggctgcccgctgcacttgcaggccagcgtgagttccaggtgggtgtgggctccgtggccccgcactcggagcagcaggctggcgctgccggccctgggcagtgaggggcttggcacccgggccagcagctgcggagggttcgccgggtcccggcgctgtgctcgaattctcgctgggcctcagctacctccccgccgggcagggctcgggatctgcagcctgccatgcttgagccttcccccaacgccatggcctcttgtgcggcctgagcctcccctaccagcgccgccccctgctccgcggcgccgggtcccaccgaccacccaagagctgagaagtgcgggcgcacagcgcgggactggcaggcagctccacctgctgccctggtgcgggatccactatgtgaagccagctggactcctgagtccagtgggacttggagaacctttatgtctagctaagggattgtaaatataccaatcagcactctgtctagctcaaggcttgtaaatgcaccaattagcactctgtgtctagctcaagatttgtaaatacaccaatcagcactctgtgtctagctcaaggtttgcactctgtatctagctaatatggtggggacttggagaacctttagtgtctagctaagggattgtaaatacaccaatcagcactctctgtctagctcaaggtttgtaaatgcaccaatcagtgctctgtgtctggctaatctagtggggacttggagaacttttgtgcctagctcagggattgtaaacgcactaattggcaccctgtcaaaatggaccaatcagctctctgtaaaacggaccaatcagcaggatgtgggtggggccagataagggaataaaagcaggctgcccgagctagcagtgccaacctgctcccattcccgtccatggtgtggaagttttgttcttttgctctttgcaataaatcttactgctgcacactctttgggtctgcattgcgtttatgagctgtgacactcaccgcgaaggtctacagcttcactcctgaggccagtgagaccaggaacccaccgggaggaatgaacaactacagacgtgctgccttaagagctgcaacactcgccgtgaaggtctgcagcttcactgccgaagccagcgggaccaccagcccgccagaaagaagaaattccaaacacatccgaacatcagaaggaacaaactcccgacacaccacctttaagaactgtaatactgcaagggtctgcggcttcgttcttgaagtcagtgagaccaagaacccactgattctggacacaccagtactttgggaggccaaggcgggtggatcatgtgaggtcctgttcaagactagcctggccaacaggatgaaacaccgtctctactaaaaatacagaaaattagccaggcatggtagcacatgccttgtctatagtcccagccgctcaggagactgaggcaggagaattgcttgaacccgggaggtggaggttgcagtgagctgagatcgcgccactgcactccagcctgggtgatggagtgagactctgtctcaaaaaaaaagaaaaaaaatggatgtgactgaagaaagaaaagaggttccctttggaagaagcagatctgctcttgagggggtgaagctgcaggggaacgcccaggctttttccctcccaccagtacctccttttggctgaatccaaccccaaagcagagggcaatggagcccagtggtgtgggcctagaggtcagctctcaggacatagaacaggatggttggccggacgcagtggctcatgcctgtaatctcagcactgtgggaggcagagataggagaattgcttgaacctgggaggcggaggttgcagtgagctgagatcactccactgcactccagcctgggagacagagcaagactctgtctcaaaaaaaagaaaaaaaaaaaacaccaaaaaacaggattggactgcagattgatggaacctggggtaggtaacaggaatagagaatgacctgcatagaagccacatgtcctaacttcctaatacaccttagggatacccctgagaagccagtctggagaccaaaggcatctccttcccaaaaccaaaatggggggtgggaataatgaacatttagtgagcacctaccatgtaccaggcatatgctaagtgctttatgtgtacgacgtcattgaatccccacagaagtcaatgaaggaagcctttttctttgttggctgctgggacaaaaatcaaaatcacagtggctcaaggaattaatatagaatcagggtctcgctctcttgcccaggctagcgtgtaggggcacaatcatggctcactacagttttgacctccctaggctcaagcgatcctcccacctcagcctcccaagcaggtggaactataggcatgtgccaccacgcctggcaaattctaaagttttttgtagaggtggggtcttgttgtgttgtccaggctggtctccttggcctcccaaagtgctgggattgcaggtgtgagccaacatgcctggtccaatttagattttgttttttaagatggagtcttgctctgttgcccaggctggaatgtagtggcaccatctcggctcactgcaacctctatctcctgggttcaagcaattatccctgcctcagcctcccaagtagctgggattacaggcgcccgccaccatgcccagctaatttttgtatttttagtagagatggagtttcgccacattggccaggctggtctcgaactcctgatctcagatgatccacccacctcagcctctcaaagtgctgggattacaggcatgagccactgcccccggccccagtttagattttaaagaaattactaaggctgctaaaccttatgttgctctcagccccaagggcactgagagttgggttttcccgatcccaggcttcctgggtatagctcagaccacccttaaattttccacccatgctccctcatccattctttcttcccttctacaaattttcctcttctctgttggccaggaacatttacgcaataatgtcacaccagtgactaccagagttgaatgccgatagagtaacgggatgctaagatggacatttcaaccagggagacacaacgactagcaacagaagccagaccacagtgaagatctcttttcttttctttctttcttctctttctttctctctttctctttctctctccccctccctccctttctctctttctttcctttctttcttttcttttctattttttttttttttgagacggagtctcgctctgttgcccaggctggagtgcagtggcgcgatctcggctcactgcaagcttggctcactgcaagctccgccttccgggttcacgccattctcctgcctcagcctcctgaggaactgggactactggcgcctgccaccacgcccggctaatttttttgtatttttagtagagacggggtttcaccgtgttagccaggatggtctcgatctcctgacctcgtgatccgctcgcctcggcctcccaaagtgctgggattacaggcgtgagccactgcacccagcccttccttccttccttccttccttccttccttcctttccttcattcctttccttcattccttccttctttccttccttcctttctctttctttctccttccctccctctctccttccttccttttctttctcttttttttttttttgagacagagtcttgctctgtcactaggtaatcttggcttactgcaacctctgcctcccaggttcacgccattctcctgcctcagactcctgagtagctgggactacaggtgcacaccaccacacccagctaatttttgtattattagtagagacgaggtgtcaccatgttggccaggctggtctcaaactcctgaccttatgatccgcctgccttggcctcccaaattgctgggattacaggcgtgagccaccatgcccagcctttttcttttttttttgacagagtcttgctctgttgcccaggctggagtgcaatggcacaatcttggctcactgcaacttccccctcctggattcaagcgattctcctgcttcaggctctcaagtagctgggattacaggtacgtgccaccacgcctggctaatttcatatttttagtagagttgggatttcaccatgttggtcaggctggtcacaaactcctgacctcaagtgatccacccgccttggcctcccaaagtgctgggattacaggtgtgagctaccacatctgatccctaatttttaattgacaagtaattgcatatgtttatggagtatgatgtgatgtttcaatactgtatatattataaagcagatcgcgctaatgaacatatccatcaccttacatacttatttctttgtagcgagaacagtttgtttttttagagacagggtgtgtaaaatattgcccaggctggttttgaacacctgggctaaagtgatcctcccatctcagcctcccaaaatgctgggattacacatgtgagctaccgcaccagaccctatagtgagaccatttaaaatccactcatttcacaagtttgaaaatacattatggggtggggcacagtcactcacgcctgtaatcccagcactttgggaggccgaggcaggtggatcacgaggtcacgagttcaagaccagcctggccaagatggtgaaaccctgtctctactaaaaatataaaaattagccaggcgtagtggcgggcgcctgtagtcccagctcctcaggaggctgaggcagagaattgcttgaacccgggaggtggaggttgcagtgagccgagattgtgccactgcactccagcctgggtaacagaacgagactctgtctcaaaaaaaaaaaaaaaaagaaaaagaaaaaatatacattatgattagctatagccaccttgctgtgcaatagatcaccaggacttactcttcctaatggaaactttgtatcctttgggcaacatgttttccgcgaccccagactctggtaaggactgttctactctctacttcggtgaatgtgacttttttttttttagattctgcatacaagtgagatcatgaactatttgtctttctgcgccaggcttagtttacttcgcataatgtcctccagattcatgcacgttgttgcaaatgacaagatttccttcttttatcaggctgaacagtactccattgtgtatatgcaccacattttctttatccattcattcattgatggacacttaggttgcttccatatcttgttattgtgaatagtgctgcaaagaacttgggagtgcagatagctcttccgaatactgatttcctttgcacattactcggaagataaatttttttgagacagagtctcactctgtcgcccaggctggggtgcaatggcccgatctcggctcactgcaagctctgtctcccgggttcacgccattctcctgcctcagcctctggagtagctgggactacaggcgctcgccaccacgcccagctaatttttttttttttttttgtatttttagtagaaacggggttttaccatgttagccaggatggtctcaatctcctgacctcgtgatccacccgcctcggcctcccagagtgctgggattacaggtgtgagccactgcactcggcctaatttttgtatttttagtagagacagggtttcactatattggtcaggctggtctcgaactcctgacctcgtgatccgcccgcctcggcctcccaaagtgctgggattacaggtgtgagccactgcacccagctgttttgttttttgttttttgtttttttttcagacagggtctcagtctgctgcccaggctggagtgcagtggcacaatctcagctcactgcaacttctacatcctgggttcaagtgattctcccacctcagcctccgagtagctgggactacaggtggacaccaccacgcccggctaatttttgtattttttatatttttttagtagggacaaggtttcactggcgaggctggtcttgaactcctgacctgaagtgatccacctgccttggcctgagacaggagaatcgctggaacttgggaggcagaagttgcagtgagccaagattgccccactacactccagcctaggtgacagagtgagaccttgtctcaaaaaaaaaaagtgaaagtgaaagatttcattctgaacaccactaggtcctgaaaggcaaggttggctgacagcagacccagtgcaatgagaaccatctgacccctggatttgtttccttcctgtggccgctataacagtaccacaaactgagtcacttaaaacaacagaaacctattttctcacagttctgcaggccagaagtctgaaatcaaaacatctgcagggccacgctccccacagaggctctagggaggaatccctcctggccccttccagcttgtgagggctccaggcattcctcggtggcgaccacagcattccaacctctgcttccgtcttcacgggtccttctctactgtgtctcctctctgtgtctctcctaaggagagtcgtctgtggatttaggactaccatgttttccaggatgatctcatcttcagaattctaatatctgcaatgaccctttcaaaacccctcctacagagttgacaaggattgcatgccagattccagacagaaatacagttacaatgaaccatgaatcaggctgcactagggtccccttccttgctgctaaaggtcaggtagtacttttacaccccattgtttcaccaggcgcagtggatcgcgcctgtaatcccagcactttgggaggccaaggcgggtggatcacctgaggttgggagttcgagaccagcctgaccaacatggagaaaccctatctctaccaaagatacaaaaattagccaggcatggtggtgcatgcctgtaaacccagctactggggaggctgaggcaggagaattgcttgatcccgggaggcagaggttccagtgagctgagatcgtgccactgcgctccagcctgggcatcaagagcgaaactctgtctcaaaacaaaacaaaacacaaatacatcccattgtttctacagacaggatctctgacattaggagcatatggcttttttttttttttttttttgagatggagtcttgctctgtcacccaggctggagtgcactgacgtgatctcagctcactgtaaccgctgccttccgggttccagcgattctcctgcctcagcctccagagtagccgggattacaggcgtgcaccaccacacctggctaatttttgcatgtttagtaaagaaggggttttaccatgttggccaggctggtcttgaactcctgacctcaagtgatccaccgcctcggcctccaagtgctgggattacaggcgtgagccactgcgcccagtcaggatcatatggcttttgcttaaggatcgcttcagatgtttttgcagatcctgaattccagcaaccagtctgaagaagaccccccatataggaatgggatcagcatgagaatacagcttcttcacccaccccttgtccctcaactcctgcccaatcctctgtcccaagacttcatcttgcactctttgaccaatcaaaggatctccacacttgggcccactccataccccttaaaaaccccagccccaaattcctaggggagatgaattttttttttattttatttcatttttatttattaattttagtttgtttgttttctgagagaatctcactctgtcacccaggctggagtgcagaggtgcgatcttggctcactacaaccttcatctcccaggttcaactgattctcccacctcagcctcccaagtagctgggactacaggcacgcaccaccacacccggctaatttttgtatttttagtagagacagggttttgccatgttggccaggctggtctcaaactcctggcctcaagtgctctgcccacctcagcctcccaaagtgctgggattataggtgtgagccaccacacccacccaggagatggattttagatttgctcccatctcgtcgatctgtggccctatgattaaacctccttctctgctgcaaactggtatctcagcatgttgacttgcccagtgcctcaaacaatgggcctatgacagttacagtttatccacctaagatcacattcaggccaggcgcagtggctcgtgcctgtaatcccagcactttgggagtccgaggtgggaggattgctcaaggccaggaccttgagaccagcccgggaaacatagcaagaatctctctctgcaaaaaaatacaaaaattagccaggcacggtgttgcgtgcctgtggtcccagctacttggaaggctgaggtgggaagatcacttgagcctgggaagtcgaggctgcagtgagccaaaatcatgccattgctctctggccaccctgagtgacagagcaagaccatgtctttaaaaaaaaaataagttggccaggcgtggtggctcatgcctgtaatcccagcactttgggaggccgaggcaggcagatcatctgagatcaggagtttgagaccagcctggccaacatggggaaagcccgtctctcctaaaaatacaaaaattaggcggacgtggtggcaggcgcctgtaatcccagctactcaggaggctgaggcaggagaatcgcttgaacccgggaggcggaagttgcagcgagccttgattgcgccactgcactccagttgggagacaagagcaagacttcatctcaaaaaaaaaaaaataataataatataaaaacatcacattcacaggttgcaggggccagagtgtggacacatccttttggggggccaccatttgacacactatattccctcctggagctgcagccctggccgtgaaaggaaaggagaggaaagcaagaaggaaggggccctagcaccacccagacccccagaacatgacgctggtggggatggaggagaggtagaaggaaataggattgaagtctaaatcaaggccccagcttgggtctggacattccttgttttgaattgaagccaagctgccctgtgactaaggcgactccaggaacatctgttatctgagatgaacagagaacaaagtcataaggctaagattttatcaaggggattgcggggcaggggggacacatttccctgtgaaaagcatgttatagagatcatgacagatcagcccttgaccggaattcacacaatgctggttcatttcatcacagggaccacctgacccccaggattgttctagaaggtctttttctctaccatctccacaccaatccctctccacctgccgctcccaccttccactgggtccccatcctcctctgggctggggccctgcctgcctgccatccattcactcaacaaacacttattattattattttttgagacacagtctcgctctgtcgcccatgctggagtgcagtggcacgatcactgctcactgcagcctctgcctcccaggtttaagcaattctcatttctcagcctctcgaatagttgggattacaggcatgcatcaccacacctggataatttttgtatttttagtaaagacggggttttgccatgttggccaggctggtcttgaactcctgggctcaaatctgtccgcttggcctctcaaagtgctggtagttacaggtgtgagccactgcgcccagccctaacacttattgagcacctgctgtatgccaagggccagggaagggggcggcatacagagccaggagggaacagtgtggaggaacttcccttttggagctgactttccagtgggagacctgggcgatgacaagatgaacaaggaatgaatattctgtgttgtagccaaaagcagccagtgcaatggagaaaatacagcagcctcaggcctgtaatcccagcactttggtaggccgaggcgggcggatcacttgaggctaggagttcaaaaccagcctggtcagcatggcaaaaccctgtctctactaaaaatacaaaaattagccaggtgtcatggagcatgcctgtaatcccagctactcggtaggctgaggcaggagaatcacttgcactcggaggtggaggttgcagtgagctgagagcacgccattgcactccagcctgagcaacagcgcgagaccccgtctcaaaaaaaaaaaaaaaaaaaaagcaataagagtctgtggatgttgtaaattgggtgtgtgtgcatcagagaaggcttccctggggaggggcacaagtgaagggagacctggaggaggtgagggaggagccatgtggatatctggggaggatgactcaggcagagggaacagcctgtgcaaaggccctgaggcaggatgtctttggtgagtttggagaacagtaaggaggcccatctgcttggagaaagctgggttttctggcctccgtgaggactggagttttgctctgagtgaggcagttggtaaggagaataatgccctccttcccaaggtatctacttcctcatcctaaactttcaagatctcatggcctggggaggataggagaaaggggctggtaactgctccagcgggttgataaacatgggtacttcagggaggcttcctggaggagtgtcaagcatatgactggcttgaattgcgggagaggcaggctgagcagggagcaggtgcccagggagaggcagaagacaggtcagacacttaaaagtgtctaaaggagaaagactcctttggacacagccaggccctgagaagcagggttagtgaattgctacctcatgcaacaaaagggactttgctgattaggtaattaaggatcttcagacagggaaatgaccttggatcatctaatcacacaagtccttaaaatgcaagggggcggcagaggggagttgaaggctgtcatatgagaaggacttgactcgtcattgctggctttgaaaatggagggagggcccacgagccaaggaatgcaggcaacttctagaaacggggaatggacaaccagcaagaaaacagggcctcagttctacaaccccagggaactgaatcttgcacccctaaatgagcaaaaaatagatcatcccctaaaacctccaagaaaggactgcagcctgctgacatcttggtcttaggcaggtgagaccctgaaccacatctctgacctctagagctgtaggataatttgcgtcgttaaataaatgctagctagtgacggcaaccatgggaaattaacacaaggtgggagctttcccggttctgagcgggaggagggggcgtggcctgatcaggtgttcgctcgcgccctctggaggctgcggagggaacaggcttcagggccaggctggagacctgagcaagggtagagggaactgcacagtccaggtgagggatgctgggctggaccaggtgagggatgctgggctggaccaagtgagggccggggaggtggggaagaaatgaagtccgaggtttgaacgtggatggaaagagaaaaaaagagaggactccagcggggcacggtggctcacgcctgtaatcccagcactttgggaggccaaggtgggagaatcacttgaggtcaggagttcgagaccagcctggccaacacagtgaaacaccgtctgtaccaaaaatacaaaaaatagccaggtgtggtgctgcacgcctgtagtcccagctactcaggaggctgagacagcagacttgctcgaacccgggaggcggaggttgcagtgagcctagactatgccattgcactccagcctggaagacagagtaagactccatctaaaaaaaaaaaaaaaagagagagaggactcgagtcaaggatgaccagaagcctctgagctgggaacttggagtctcctgttccctccaccccaactccactagtccctacctccccttggcctcacctgccagcagttgtcccaggcggaggccacatgcttccctctcctctgaggccttgcccctgcctgtgacctctcacttgtcatatctgctgtctctgttctcaagacaggaagtcagatgggagttgaagacggctgggacctgtgagtccccaggcccccagagggattccggatttgagagtcggcctcctccctcccatccaagcccagccctgccaaatcagctcccagctcactccctggtctgcacctctttctctgtctctttctctctctggaattttcattctctttttggtaaccgaattatcccatctccacctctcactgggggccgcccgcagaggcgtgggcgaggaggggcccgggtcgcagcgcgagatattaaaccatcaatcacccgccaacgccgactcccccgcaccaggaccctccattggctccacctggaagcagaccagctccagtgcaggcctggaggcctggggaccccatcaaaatgggaggccttggaagaatctcacaggccctgcatctacctgggcaggtgcctgggtgcagatcggcctggctcaatgcacagacaaggtgtcctgggttcaaatccacaagctacttcttatccacacgtgggagccactgcattgttctgtgtcttggtttcaccacctgtaaaatggtgataacagccgggcatggtggctcatgcctgtaatcccagcactttgggaggctgcggcaggcagatcacctgaggtcaggacttcgagaccagcctggccaacatggcaaatatataaaaatctctactaaaaatataaaaattagccaggtgtggtggtgtgcccctgtaatcccagctacttgggaggctgaagcagtagaatcacttgaacccaggagtcagaggttgcagtgagccgagattgcactactgcactccagcctgggggacagagcgagactccgtatttaaaaaaaaaaaatggtggtaacattttctacatcattggggttcactgtcaggattaaaccagttaaggcagatggcaatatctggctgatagtaagtcctgtctaggatttgctgctagaatgattttccttcaagattgggggggggtcattcacttgtgaaagaaatccaagattctggcttttgaggggacttaatggggttcatacttgtgtcacctcacagctgctgccttgtataggttggaattggattttttttttttttgagatggagtctcgctctgtcacccaggctagagtgcagtgcacaatcttggctcactgcaacctccgcctcccaggttcaaggaattctcctgcctcagcctcccgagtagctgggactacaggcacgtgccaccatgcccagctaattttttttttatttttagtagagacggggtttcaccatcttggccaggctggtcttgaactcctgaccttgtgatccacctgcctcggcctcccaaagtgctgagattacaggcgtgagccaccgcgcccggccagaattggatttttttgttttttgtttttgagacaaagtcttgctctgtcacccagggtgaagtgccgtgtggtatgatcatggctcactgcagcctcaaccttctggatttaagcgatccttccacctcagcctcttgagtagttaggattacagacatgagccgccccacccaggtctaggggaaaaaaaattaaaggctctttcagaaccttaactagggccaagcaacgcatatttcaaggcactcaattcacaaaacaaggtctcagtgctttgcacaggctgttccccctgcctaaaatgctgttccctcagccagccacgtgactcctccttgcctgcttctgggtttgcggcaatgtcccctcctcagtgaggtgactttgcaaaaattgcacccagggcccctgcccgcccccacccctcccagctgtatttccctccatagcatgcatcccattttgcataccgtatgcagtgcttgtggggtttgtctgttcatcccactggagtgttaaacccagggcaaggttcattcattcactgcccagcacggcacctggcatgaaataaacacccagtaaatacttgttgagtgaatgcatgaacaaattccattcagctgctcccagaggaccccacaggctgcagccagctcaaagctgctctggctgggccggtcagcaatcttgggtttcctggaggtgggtggagggggtatcactggatgtgttcagagatgcagctggttcactatcaactttgtgtggacttttccctttttctttgaggctggatctcactctgtcacacaggctggtgtgcagtggcgtgatcacagctcactgcagcctccactccagcgatcctcccacctcagcctcctgagtagctgggaccacagttgtgcgccaccatgcctgggtaatttttgtatttttcatagagacagggattcaccatgttgcccaagctggtcttgaactgagctcaagcaatctgcctgcctgggcctctcaaagcattgggattacaggcgtgagccacaacgcccagccaggtgtttattttctcattatttatttattgtagagatgggggcctccctatgctgcttaggctggtcttcaggtcctgggtgatccttctgtcttggcctcccaaagtgctgggattacaggcatgagccatggcgcccggccttgtgtagatctttaaaaggtaccccttccatgctgggtgccgtggctcatgcctgtaatcccaatactttgaaaggctgaggtgggcagctcacctgaggtcaggagttcgagaccagcctggccaacatggtgaaacctcgtctctattaaaaatacaaaaattagctgggcgtggtggcgggcacctgtaatctcagctactcgggaggctgaggcaggagaattgctggaacctgggaggcagaggttgcagtgagccaagatcgcaccattgcactccagcccaggcaataacagtgagactccatctcaaaaaataaaataaaataaaataaaataaaataaaataaaataaaataaaataaaataaaataaaataaataaaaggtacctcttcctctgggcagatgcaatgtgtggtgaggggaacagacgacgtcagcttctgctctagcttctgtctggtatgcttgtgcagtgtgcaacttgcacaactgttcttggcagtactgctcctgtcccccatctcttgagtagctcagaaggtgaggggcgctgtgaagaccaagtaaccagaggctggacctctacacccaggtgtttagagggccaaaccccaacctctgtgcccagctcattgctggtgaaaaatctgccaaggaactggactgttctgggtgacaccccaaagactcccctcctggtatccccagcagtgtctcccttgctcctccagactaggggtgccctcgccttccccagccccctctgcacgtttccacccagccaggagtcccacacttgcctgcttctcccaaccttctctctctctctctccagcacagtggctatttttatttttccttcttattaaatttccaacttctgcaaacaccatggcccctgcctcgccgcgccccccccccttcccttagggcggatttgattcacttgcgttttattaacagattaaaaaaaaaaaacctgcagctgccaccacaatgtgactttctccgctttcctggaggtttagggaaccgaggagaactgggctacaggatctctctctgggtttaaattcgccctcctccccactcccagggacctttccatcatagcctgagcggcgaggtcgggaaggggctgcggaatgaggttggatgtcgttctgggtttaggggggaatgggatgggtgtcaggcctgatgcggttcccccagccagggcctcgtcccaaggcggaactggaaattaaaaaaaaaaaaaaaaaaaaaaggcaatccgttgggaagccccgcccccgcccccgcctcccccccccacagaccctgggtgctaaactcttcgggtgggaggggcagcctcgggggtgtgggcttagagttggcgcctcccacacagagctggggtcgcccctaccctctctcccttaggatggctggcagggggccttgggaaggtttgccgcctgcccaagcccggctcgctcagttttctttcctccttaggacattctgattccggtgctgactcccagacctgagagcaaattgctccttcatgccccggggtgttttcctccccccaagtctttttttttgtcagtcgccctggcaaccaggaacccagctgcactttacttccctgggatacagaatgggggtagggggtgatggggaaactaactgggtcgtttaggccaggaccttcctaccctcctctttgccccctcttagtcctccacccctccccacaccacctggtccagccttgattgacaagagggcaggttgcccctgtcagggttacccatctgggtggttgggccacagcttccttctgggtcactctgttctgggaaggtccttcatttggcccgagggctaaggttccagctgtcagtgaaatccctttccccttcctttcctccactctttagtccctcaatcagggtgggctggtacggttgggcaggttggacactgcacaaggggacactgagtgtgttcaaactaagctcccgatttccattgctcccttactccatagcacactacagactaacctctcctctgccttactgacaccaactctctgctatcaggagagccaatgatttcaataaaatacttcagtcctggtcacaccccaatgcagagctgaagaaaggaagtccagtcgggaatttggggtcttgaacaacccaagccacagctcctgtgggagcttagagagagagcaaacctgggcagaaagaacttctacagagggccgggcgcggtggctcatgcctgtaatccagcactttgggaggcagagacgggcggatcacgaggtcaggagatcgagaccatcctggctaacacagtgaaaccccgtctctactaaaaatacaaaaacttagccgggcgtggtggtgggcgcctgtagttccaggtgttcgggagacggaggcaggagaatggcgtgaacccgggaggaggagcttgcagtgagctgagatcgcgccactgcactccagcctgggtgacagagcgagactccatctcaaaaaaaaagaacttctacaggggccaaagctagggtcgaggaccatagaatgccctggggtacccagggaggggcagggaatgattatcaaaagccccaaagaaatcatggggctggtcaagtttgcttcacggacccaattctacagcccaccatctatactctttgcctaggtagctcctcccactgggaggtggagcctatttccacaccccttgaatctgggttggtctcgtgatctcctttggccaatcaatggattgcagcagaagtgaagtcacttcccaatctaggcctgaagaagtggtgcatgtttctgctcgatgtctggaaaccctgcccctgtcaggtgaccaagccctagctagcctgctggaggatgagggaagaatcctgttgtcctagaccagcctacagccagccgggccccaaatatacgaaaagacccagcctgaataaatacagtgtgcctcttggacccatagacgttggtgggtgagcccagccaggggcggaaaaactgctctgtagcctgcgaagccaaaattaatgctgattgtcctaaactgctggatttgagcgttgttaggcagctttttttttttttttttgactcagtctcactttgtggcccaggctggaatgtagtggtgcaatcttggctcactgcaacctctgcctcccggattcaagcgattctcctgcctcggcctcccgagtagctgggattacagacacccgccaccacgactaatttttgtatttttagtagagatgaggttttgccatgttggccaggttggtctcaaactcgtggcctcaagtgatccagctgcctggcctctcaaagtgctgggattacaggcatgaggcactgtgcctggccttgtgttagacagcttaactggcaacaggtaactgacaaggagcctggcaggcacaggtgtgcattggtcagcacgtccccttgcccacgaaggagctagactcaaatcccgaggtccccaaaattgattgtcaactctttaacttcctgaggaatccttccccatttttcctttatttgtttcttttttgtttgttttttggcatggccttccagtgaaattccccatttttcctttttctttcttttcttttttttttttttttggacggagtctcgctttgttgcccaggctggattgcagtggcgcgatctcggctcactgcagcctctgcctcccaggctcaagcgtttctcctgcctcagcctcccgaatagctgggattacatgtaccaccatgccccactaatttttgtatgtttaatagagacggtgttccaccgtgttggccaggctggtctctaactcctgacctcaggtgatctgcccgccttggcctcccaaagtgctgggattacaagcgtgagccaccgtgcccagccccccatgttttctttccttggtatctctctgattgcacctcctctcctctctctttcacttccgtccagccacatcagcctcctagctgatctcctctatgctagttcccaccccagagtcttggcacccgctgttcctcctgtctggaaccttcttcccccagatctctatgtgtatcctccgcttttactccttcaggtctctgttcatgtgcgtgatcctctgaggtgcccgccttaacttagatagatacacgtctccttccaggccctcaccaatctactactgctcccaatgggagccacatcatgtccagcctaggacgctaaagttgacccagggctcagatgggagcagaacagccctcccctaaaacattcctttttttttttcttttttcttttttctttttctttttttttttgagacagagtcttgttctgtcacccaggctggagtgcagtggcgcgatcttgactcgctgcaacccctgcctcccaggttccagcaattctcctgcctcggcctctcgagtagttggaattacaggcacctgccaccacagcaggctaatttttgtatttttagtagagatggggtttcaccatgttggccaggctagtctcgaactcttgacctcgggtgatccgcctgcctgagcctcccaaagtgctggaattacaggtgtgagccactgtgcccggccacacaaaaccattcctcatccacctttcccctaatgattttactatccatggctaatcatgtcctagatccatgatttctttctttctttcctttttttttttttttttaagagacggggttggggggggtctcattatgtttcccaggctgatctcgaactgctggcctgaagcgatcctcccaccttgccctcccaaagttctgggattacaggcgtgagccacggtgcccggcctagagccatgatttcattacaagttgcaaaatactgcattcccagtttatcatggcattttcccatttatacatctgtcgtctccaacaatctggaaagccctcaacagcagagtcagagccacagggtaccaaggaaacatttgctgaaagaatttgaattcaggagatggagcctattgggggaaaaaacccaaacaaacaggtatttgttgtttagggcaaagaaacatggcaccatttctcctgcttctaggatcaaaggctgttccactccaatctccgctggatgccaagcctggccaaaagtcccaggacatggcctggccccctacccgtcaacgctttccctcttgtgacaccccatggagtcaccctatggactcaggaccaatggggttttggggagaagacagatcgtctgtctacaggtatcaacattgctttccttctcaaaaatttttttattttaaacctccccacaattcaaatgtttctcttattatcttctgccgagggaaaaaaattaataacatggcacaatataaaatactaaattaaaggcattttggaaccagcaattatttcataagcttctcttttattgccacgctaatgtgcctaattgctatcttaatgaggacattaatttctggctaatgtgatgttattatagaaattgcagtcaatctcttaaaaggaggaaagtgccagaaagccgtcccacgaggcagaggctttggtcaccccggggctgaggggcaaaggggaggggaggagacggtgctggaacccgggccaagactgggggaaggatgcggctgctgggagccagagagggggaaggcaggggacttgtgctgggactaaaacctcccagggaggccctgatctgaaagccagctgttgccgtgcccggggatctaggagatgaaactgaataggggaaagtgttacagcaataataaaacctgacatcagtggcaggcacggttgaggcattttctatgctaatccttgcaatagctctataaaatagatagtgtcatttcccccattttatagacgggggaacagagaggttgagtaatttacccaaggtcacacagctattacatgatagagatgggatttgaacccagcccgtctggcttaactgctgagctatgctgcctttcagccagcaccctgaaaccatcgataataatttcaaacatttattgagggcttactatgcaccggctgtgagtcaagccttttgcacacagcatctctgggtgggctccatcttggagaaagaggtgcagctacagccacatctgagcactccttaatatacagggaggacgaggcaaggctcaaagctcgggggctggtgttgcacctccctccccacacaggaacaggaaatccattgtaggtagagagacttcagggcccagagaggagaaggttattccctctgagttgcaccttatcacaggttactgtggtggtcagggtaggttttgaaggcaaatggtctgggttagaattctagcttttcccatttggcgagtggccgaccctctctgcacctcaatttcctcatttaaagattggggctatgggaggccgaggtgggcagatcatttgaggtcaggaattcgaaatcaacctggccaacgtggtgaaaccctgtctctactaaaaatacaaaaaagaaaatgagccaatcatggtggcctgtgcctgttatcccagttactcaggaggcagaggcaggagaatcacttgaacccaggaggcgaaggttgcagtgagctgggatcgtgccactgcactccagcctgggcaacagagtgagactccatctaaataaataaataagactggggctaacaatggaacctacctccaagggctgttataagaattgagcaactggttgggcgtggtggctcgcacctataatcccagcactttgggaggctgagatgggaggattgcttgagcccaggagtttgagactggcctgggcaatatagcaagactccatctctacagaaaaaaatattaaaaattagccgggcatggtagcatgcacctgcagtcccagctacttgggaggctgagatgggaggatcgcctaagtccagaagtttgagaccagcctgggcaacatagcaagaccccatctctacataaacgtataacaagctgagcatggtggcgcccccatgtctgtagtcccagctactccagaggctaaggcgagaggatctgcactgcagcctgggggacagagcaagactccgtccctaaaaaatccaaaaacaaaataaaagacaaactgtgtattagaacaaggacacgccagctgctgtaacgagcaacctgtagatcccagtggcttaatgcactaaaggctactttctcactcacatcacgctgccgcacctgggaaccagacgccggctatattgtggcttcaccttcttccagtgactcagaggccccacaagaccctctttgtccagccagcagatgcaaaggaagaattagaaggtgcaggtgggaggtgttaaaagcctgaatgtagcacacctcacttccattcgcatcccacagaagcagataatgataaaggttaggaaataggtttggagtctgggaaacatggggagaccccatatttacaaagaagaaaacttttttaaaattatatggttaatggtggcgcaagcctgttgtcccagctactcaggaggccaaggtaggagtgaggtaggaggctggaagggactctggaggtgaagttcagacactggaccaaattgatggccagatgcggtggttcacacttgtaatcccagcactttgggaggccaaggtgggtggatcacctgaggtcaggagttcgagaccagcctggccaacatggtgaaaccccgtctctactaataatacaaagattagccgggtgtggtggcaggcgcctctaatcccagctactcgagaggctgaggcaggagaatcgcttgaacctgggaagcagaggttgcagtgagccgagatcatgccactgtactccagcctgggagacaagagtaaaactccgtctccaaaaacaaacaaagaactagctaaagcaggtgtgtgtaggtgtgtgtgtgtgtgtgtgtgtgtgtgtgtgtagcacctccccataagacacgcccaccagtgtgccatgtcggtttacgattaccatggcaacacctggaattccccgcccctttccatggcaactacccaaccacctggaagttaccactctcatcctagaaatttctacataaactgccccttaatttgcatataattaaaaatggatataaatatgagtgaatacagcagcacctctgagctgctactctgggcacactgccttttgggtagccctgattcttcactaaattttctgtttaacaccaccagctctcccttgaattcctttttgggtgaatctaagaaccctccagggctaagccctaatttttttttttttcttcagactgaatctcgctctgtagctcaggctgctggagtgtagtggttcgatctcagctcactgcaacctctgcctcctgggttcaagcaattctcctgcctcagcctccccgagtagctgggattacaggcacatgccatcaagcccagataatttttgtatttttagtagagatgggatattgccatgttggccaggctggtcttgaactcctgacctcaggtgatccacccaccatggcctcctgaggtgctgggatttcaggcattagccgctgcacctggcttttttttttttttttttttgagaaggggtcttcgacacccaggctggaatgcagaggtgcagtctcgactctctgcagcctcgacctctgggtgtcagatgatcctcccatttcaacctcccaagtagccaggagtacaggtctgtgccactacacccgcctaatttttgtaatttttgtagagatgggatcttgctatgttgcccaggctggtatcgaactcctgggtccaaatgatccacccgcctcgcatcccaaggtgctgggactacaggcatgagtcacccacccagcctaagccccaattttgggggcctgcttattcctgcatcaggaggagcactggaggccaggagtttgagaccccaacctgggaaacatattgagaccttatctctacaaaaaaagaaaaagaaaaaaattagctgggtgtggtggcacacacctgtgtcccagctactcaggaggctgaggtgggaggatcacttgagcccaggaggtcaaagctgcagtgagccatgatcatgccactgcactccagcttgggtgacagagtgagacccccacctctaaaaataaaaatagagcaaataggtctgggctggaggcagcccaagggtcccctggtttcatcactttccgtccatcttcccaaacgcatcaccttggcaagcacacagcaggcaggccagacagatgcgcccggtaaaaatacaagaagctaactgggcacggtggctcacacctataatcccagcactttgggaggctgaggtgggtggatcatgaggtcaggagttcgagactagcctggccaacatggtgaaaccccatctttactaaaaatacaaaaacacaaaaattagctgggcgtggtggtgtgtgcctctaatcccagctactcgggaggctgacacaggagaactggttgaacccaggaggcggaggttgtagtgagccgagatcgcaccactgcactcccagcctgggcgacagagtgagaccccatgtctacaaaaaataattctaaaaattagtcgtgtgtggtgtcgtgcaactgtagtcccaactactcagggggctgaggtgggaggatcacttgaacccaggagtttgaggctgcagtgagctgtgatcacaccagtgcactcctgcctgggcaacagagagagatctcatctctaaaaaaagaaaaaaggagccaggcacggtggctcacagctgaagtcccagcactttgggtggccgagctgggtggatcacctgaggtcaggagttcgagaccagcctggctacatggtgaaactccgtctctactaaaaatacaaaaaaaaagtagccaggtgtggtggcacatgcctgtagtcccagctactcaggaggctgaggcaggagaatggcatgaacccgggaggtggaggttgcagtgagctgagatcaagccactgcactccagcctgggcgacagagcaagactctgtcaagaaaaagaaagggaaaggaaaggaagggaaaggaaggggaggggagaggacaggaggggatgggagtggaggggaggggaggggagggggagagaaagaaaagaaagaaagaaaggaaagggaaggaagaaaagagagagacagaaggaaagcaaaagaaagagaaagaatagtaataaaagggaccaggtgtctgaaggctgagttgcagggtgccccattgctgaagaactgcttccagaatgcagctgtgtaagtctgccagtgtggccagtgtggctgggtgcaagctcttcagggtcccaggctacacacaagcgattttactttatttctaaaatggactaactcggtttgaaacttaacccaactcactcacaaaaggaatgttctctcatggccatgaatgcaaaaccaccacgagtggccacaaacaagtataaaatagacaaaatgaggcttggtgcagtagcccatgcctataatcccagcactcggggaggctgagggtggaggatcgcttgagctcaggagttcaagcccagccagggcaacatagcaaaaccccatctctacaaaaattagccgggcatggtggcatgtacctgtagtcccagctacttgagaggctgaggtgggaggatcacctgagcctaagagacagaggttgcagtgagctgagattgtgccaccacactccagcctgggtgacagagccgagactttgtctcaaaaaaaaaagaaatgaaaaataaaaataatgaaagtgcaaagagtatcatgacattctccctatactttgtcaagactgtaaggctgggaccagctcttttggctaaaaaaaaaaaaaaaaaaaaaaaaaattggattgggaagcatcggaggggcgtgaaaatcatgctagctagcacctctctaagaattgctttttttttttttttttttgagacagagtctcactctgtcacccaggctggagtgaaatagtgcaatctccttgcaaccttcactttctagattcaagcaattctcctgcctcagcctcgtaagtagctgagattacaggcatgtgccaccacgcctcactaattcttgtatttttagtagagggggtttcaccatgttggcgaaactggtcttaaacccctgacctcaggtgatccccctgcctcggcgtctcaaagtgctgggattacaggtgtgagccaccaggcccagcctgagacttgctttttttgagggattagagggattgatagttcagtaaaggaagtcactttctcactagtgattctgtggtactgaacccagggcctggtacccagggggcaagtgggcgagtggatgttccgggtcacccagccagccaggggaggagctgattctagatcttcccttatctctctgctgtttaaaccctttttgctccttccaatgggaaacagggaagggggaggctgtgggattggaacagaaagcgtcctggactccagaggccctgagcagccattcccctccctgggcctcagttttctcatctataaaatgggtagctgcagactagagagacaatttgtaaagttctgctgtgttagtcagggttctccagagaaacagaatccacaggcgtgagagaaacacacaaagagagagacagagagagacttatttgttttttagaggcagtgtctctttttctttttttcctttttttttttttttgagacggaatttcgctgtgtcacccaggctggagcgcaatggcgcgatctgggctcactgcaacctctgcctcgtgggttcaagcaattctcctgcttcagcctcccaagtagctgggattaaaggcacacgctaccatgcccaactaatttttgtatttttagtagagacagggtttcaccatgttggccaggctggtctcgaactcctgatctcaggtgatctgcctgcctcggcctcctaaagtggtggctcatgcctggccttcattttctttctaattttttttttaaattttaattagacaggatctccctctgtcacccatgctggagtgcagtggtgcaatcacagcgcactgcaacctccacctcctggcctcaagcaatcaatcctcccacctcatcctcccaaagtgttgggattacagacatgagccaccgcacctggtggatttcttttcttagaaaagcaatacatgctcatgataaaacgcaaggaattcaaaccctatcggagggggagcatattgaatggagtctctctctcagctcctcccttccccctaatatagctctgctaagagctgcccggtgtatccgccctggcattttctatttgcacaccagagtcgatacgaatatcctccttttactttcacaaatagggatcgttgcaggcacacagttccatgatagctttttccagttaattatatactgtggacaccttccccaaatcagcacatccagacctgcctcattctgcttaatgactgcagagtattggaagatgtgccttaagagagagggagagagaaaataaaaaatgatatgtttggaatgttccacctggtagtcccagatctgggttaatggaatgggagatcacactccagttcctccccatctcttctggcttgttttctgtttgtttgttttgttgttgttgttgttttttgaggtggagtttagctcttgtcgcccaggctggagtgcagtggcgtgataccggctcactgcaacctctgcctcctggattccagcgattctcctgcctcagccgcccgagtagctgggcctgtaggtgcaccaccacacccagctaatttttgtatttttagtagagatggggtttcaccacattggccagattggtcttgaactcttgaccttaggtaatctgcctgcctcggcttcccaaagtgctgacaggcgtgagccactgcgcccgacctcttctggcttttctatgtcttgggaaccaacacagttgtagtctctggccagctcgatttgagtgggacagacaggcttgtgtctgggtcagggtggaggtgccaagctcctgttccagccatcagcagtctgtggagaaaaaaaaaaaaagccaaactgaaccccagagccaagtgcatttcttgggacatagtttattgggactgggacctgctgtgaggctgtgcagacctcattgtcgagggcagctgccctgagagaacaggctaggaagatgcagcagggcaaatctatttccatcctgagtggtcacgtgcttcagcgggtcagccctggttggtccaaatccatctaatgctccattccctccctcgtaattgacttagggatggcccaccacctgtttttgtaaataaagttttattggcacacaattgtgctcatctgtttgcatgtcgtttggggcagctttcactcaaggacagaaccaaatacagatggtcccaacttaacgatggtttaactgacaatgtttcaactttacaatggtgtgaaagtgatacacatttggtagaaaccctacttcggggacccatacattgtgtttttcacgttcagtatagtattcaaagaattatgtgagatattcaacactttattttaaaataggctttgtgtttgatgattttgcccaaccgtgggctaatgttaagtgttctgagcatgtttaaggtaagttaggctaagctgtgatgttcactaggttaggtgtattccatgtattttcaacttgtgactctttcctttctcctttttcctttcctttaccttttcccttccttcctctctcctccccttccctccccttctcttttcttccttttgaaacagaattttgctccgtcacccaaggctagagtgcagtagttccatcacagctcactgcagacttgaactcccagctaaagcgatccttctacctcagcctcccaagtagctgggtctacaggcatgtgtcaccatacctggctaatttttaatttttttggtagagatggggtctcactatgttgcccaggctgataaactccagggcacaagtgatcctcccacttcagcgatgttttcagtttacagtgggtttattggaacatagttccattgtaagtcaaggaaaatcggtagttgcaacagagaatgtctggcttgcaaagctgaaagtacttactatctggtcctttacagaaagatgttgctgagccctgggctagtgtatactaacagcatgtgctacctacacctctctgcctgggggctttctcctggcccacatgtgggacaggtcagaagtgcccagggcacagccctcagtgtaggatgggtggtaactgtcaaatacctcagctttgtccgggtggtgcggtggcttacgcctgtaaaccccccactttgggaggccgaggtgggtggattacttgaggtcaggagttcaagaccagcctggccaacatggcgaaaccctgtctctactaaaaatacaaaaattagcagggcgtggtggtgggcacccgtaatcccagctactcgggagcctgaggcaggagaatggcttgaacccgggaggcagaggttgcagtgagctgacatcacaccactgcactccagcctgggcaacagagtgagactccgtctcaaacaaaacaaaacaaaacaaaacaaaacaaaaccccagctccctctccacttgggtgggatgtctccaaggtgcatgtgtcacacagttttcacagcaagccccagtgggattgggacccagcggctctcagcagtaactacttatttataccttgcatgggctgttctcatgttcctgtctcatttttcttctcccctatcagtgattcctggaatcactcagtcttagtctggtagggctaacaaaatatcacaaaacaacactaaatttcatgcagttctggaaactgggaagtccaagatcacggtgtcagccaattcagttcttggtgagggctcacttccttgcttgtgtacagccgccttctcaatgcatcctcctgtggcctttcctcagagtgcacacggggaaaaagagtgggctctgtgttgtctcttcttctaaggacaccaatcctattgaacaagggccccacccttatgacctcgattaaccttaattacctctatctaattacctaaaggctccatctctaaatacagccacactaggggttaggactttaacatgtgaatttggaggggcatgcacagttcagttccatcccagataaactgcttgcactcaaattcttactcctggatcgacttctgggaggcctcaaatcaagacaccacatgacagatttcaggttagggagaactgaaggcaagtaccaggaaggacttccttccttctagaaggcctcttcttcctctggaatctgctatttctgcatgtgatggctggagtcttggaagctgtcttgggaccatgaggagggaatacccttaggacaaagctgagatgctggggaaggtggactggacagacagaaagaacctggttgatggtatcatgaggccactgaattaaccgctagagcttccctaaccctgaatttattgttctgtgaaatggtgactattattattgtttatgttagcttgtgtagggattttcatcttcctttctgatagaggtgaggcctgaagtgggagggtggatgattaatccaatggagtaaagacaggtgctccttttttttcaaagagaagagattcgctcatacaactgaaaaatgtacacctttctggttaggggagattacagctggggttgcagcagacagaacatttttgttgttgttagcacataagagaatccttacctgccacaactaattaagaagagaagaggctgagcatggtggctcattcctgtaatcccagcactttcggaggctgaggcaggaggatcactggagcccaggagtttgagactagcctgagcaatatagcaagattctgtttctatcaaaagatctttttttaattagctgggcaatgtggagagcaactgtagtcttagatactcaggaggctgggaccagaggatcccttgaacccaaaagttcgaggctacagtgagctatgactgatgtcactgcccctccagcctggacaacagagcaagaccctgtctctgaaatttgtttttttgagacagagtctcggctcactgcaaattttgcctcctaggttcaagcgattctcagcctcccgagtagctgagattgcaggtatgtgccaccacacctggctaatttttgtatttttagtggagacagagtttcagcaggttgcccaggctggtctcaaattattagcctgaagtgatccacctgctgtggcctcccgaagtgatgggattacaggtgtaagccaccgcgcccagcctgaaaaaaaaaatttttttttaaagagaagagatttgctcacacaactgaaaaatgtaaagaagcagtatatcttcaggtgtggctggatccagatgctgagatcatgtcaccaggagtctgtttttgtccatctcttcatagatttgtttaatctagttgctgcctcagcagccatttttaggcctgacctaagttgtttgaagcacagttgtatcccatcacttttggcttagttaaaacttccccttcctggccgggcgccatggctcatgcctgaatcccagcactttaggaggccgagacgggcggatcacgaggtcaggagatcaagaccatcctggctaacacagtgaaatcctgtttctactaaaaatacaaaaaaaaattagccaggcgtggtggtgggcgcttatagtcccagctacacaggaggctgaggcaggagaatcacttgaacctgggagacggaggttgcagcgagccgagattgcgccactgcactccagcctgagagacagagcgagattctgtctcaaaaaaaacaaaaaccaaaaaaaccaaaaaaacaacttcctcttcctggtggggtgcaatggctcatgcttgaacccaggagatggaagttgcagtgagctgagatggcaccactgcacttcagcctggattacagtgtgagactctgtctcaaaaacaaacaaacaaaaacaaacacaaataaacaaaaccaaccaaccaaatggcaacaacaaaaacttccccttcttggctgggtgcagtggctcacgcctgtaatcccagcactttgggaggccgaggcgggcggatcacctgaggtcaggagtttgagaccagtctggccaacatggtgaaaccctgtctctactaaaaaatacaaaaaaattagccaggcatggtggcgggtgcctgtaatcccagctacttgggaggctgaggcaggagaatcacttgaacctgggaggtgtaagttgcagtgatccaagatggtgccattgcagtccagcctggacaacaagagcgaaactccatctaaaaacaaaaaacaaaaaaaacccaaaaaaaaccccaccaactttccctttctgtgtggttgtttgtgatgtagttcacttgttcctcatcctactaacccaaaacataacacatcccacaactgccaaccacagtgaaacctaatggccaacactagagctatataaataagttcccttttctttaaactagttttatttaaacaagtccatccgcaacccccatgggacaatatgttgcccaggcttgtctcacgattctcccatcccagcctcccaaagtgttggaattacaggcatgagccacagtgccaggccgctgtttgtattcattacgtttttttattttctgaattttatgatgctttgacatttggaggcttactgatcctggagagactgctcctcccagggctagctaattcctagagatagcaaacaacacagctgtgagcgtatgtttaatatacaaaccaagcagtccagagcccaacccccaactatctcctttatcaaactctgacacaccaagacaatattcctcctgcctaaatcaccccagagtcaggtatggacaactagagatcaccccataactcagagactgccaaaattatttgaaccatcaaaccttcttttttttttttttgagatggagtttcgctcttgttgtccaggctggagtgcaatggcgcgatctcggctcaccgcaacctccgcctcctgagttcaagtgattctcctgcctcagcctcccaagtagctgggattacaggtgcctgccaccacgcccggctaattttttgtatttttagtagagacggggtttcatcatattggctaggctggtctggaactcctgacctcaggtgatccaccttccttggcctcccaaagtgctgggattacaggcgtgagccaccgcgtccggccgaatcttcatttttatttatatttttttgagacagagtcttgttctgttgcccaggctggagtagagtggtgtgacctcaactcacttcaactccacctcctaggttcaagtggttctcctgcctcagcctcccaagtagttgggattacaggcacacaccactatgcctggctaatttttgtatttttagtagagacgaggtttcaccatgttggtcaggctggtctcaaactcctgacctcaagcgatccatccgcctcggcctcccaaagtgctgggattacaggtgtgagccaccgggccccgccatatttaaattttttttgaggctgggtgtggtggctcacacctgtaatcctagcacttttggaagccgagggaggaggatcccttgagcccaggagtttgagaccagcctgggcaacatagcaagaccccatttctacaaaaaataaaaataattagctgggtgtggtgtgtggtggcgtgtacctgtggtcccagctactcaggaggctgaggcaggaggatcacttgagcccaggaggttgaggctacagtgagctatgattgcaccactgcactccagctatgcttgcctcactgcactccagcctgggtgacagaacaagattctgtctctaaaattaaacaaacaaaaaaaagtgaataggatcatcttggctgtagaggggaggagagaatttagagaggctggagcgggggacaggagtgtgatatgattagaaataggagttggagccaggcgcggtggctcacgcctgtaatcctagcactttgggatgccgaggcgggcggatcacgaggtcaggagatggagaccatcccggctaacacggtgagactccgtctctactaaaaatacaaaaaattagccgggtgtggtggtgggcgcctgtagtcccagctacatgggaggctgaggcaggagaatcacttgaacctgggagacggaggctgcagtgagctgagattgcgccactgcactccagcctgagagacagagcgagagtctgtctcaaaaaaaaaaaaaaaagaaaaaagaatgtctccccaaggagcctggcgtgttggtgcgctcctataatcccagctacttgggaagatctcttgagcccaggagttcgagaccagcctgggcaacagagcaagaccccaactgaagaaagaaagaaagtcccccagagaccagagcttcctggggattgggaggccgtgtaatgggctatattatggggcccattggtggctcacttctccgtctagcccagaaattgtcacccgggatgattctgtctcccatggggaccatctagagacgtacttagtggtcacaactggaggcggggattgttactggcatctcggggtggaggccggggatcctacgatagctcccaaaacagacagtgaatggtctggttccaaatttccctagtgcctaggctctgcctcggacaggagccgcagccggggtgggggcaggggtgccaggacatcagaaacatcttatttatttatttgtttactttttatttgtttgtttactttttatttatttatttatttatttattggagacagagtcttgctctgtcgtccaggctggagtgcagtggcacgatcttggctcactgcaagctctgcctcctgggttcaagccattctcctgcctcagcctcccgagtagctgggactgcaggcgcccaccactatgcctggctaattttttttttttgtatttttagtagagacggggtttcactgtgttagccaggatggtctcgatctcctgaccttgtgatccgcccatcttggcctcccaaagtgctgggattacaggcgtgagccaccgcgcccagctacttatttttttgagacggagtctcactctgtcacccaggctggagtgcagtggtacgatctcggctcactgcaacctcctcctcccagttcaagccattctccttcctcagcctcccgagtagctgggattacaggcgcacaccaccgcacccagctaatttttgtatttttagtagagatggggtttcagcatgttggccaggctggtctcgaactcccagcctcaggtgatctgcccaccttggcctcccaaagtgctgggattacaggcgtgagccaccgcaccctgccagaaacattttaaagctccccagggtgactttcaggtgcagccaggcttgggaaccgccagtgcagagggtcagagggttctcccgtccggtcccctgctgcaccacccggaacctctctctcggttccccctctactgggtgtctgtggacagagagggtgggaagatctgctggtggaaacagcctcagcctctgagccccctagccccaggcccaggttctcctgcggatccctggcctggtgacctggcttgcgctgggggatcccagtgacctccttcgggcccgcagaggtctcctgaggctgctcaggacttcctctccctcagcctctttgccctggctagggagagagacaggaatggggccaacaaagggaataagaattctggagggggccgggcatggtggctcacgcctgtaatcccagcgctttggggagctagggcaggtagatcacctgaggtcaggagttcgagaccagtctggccaacatggtgaaaccccgtctctactaaaaatacaaaaattagccaggcatggtggcaggtacctgtaatcccagctgctcaggaggctgaggcaagagaatcgcttgaacccacgaggtggaggttgcagtgagccgagatggcgccgctgcctgagtgacagagcaagactctgcctcaaaaaaaaaaaaaaaaaaaaaagggaatttgggaggggagagaagtaaccctggtgtgaagtgtgaaaggagagaacttagggcaggaggagcagggtggaagagaacggcggccaggcctggagcacacgtgcattctcagcaaacaggggccctgtccccaggacatacactcacactcaacactcacacttatgctctgtcacactcacacagtcacacgcatgctcatacatggtctcacacactcatcctcacacagccccacagccttgcacactcccacccaccctcacacagccccacagcctcgcacactcccacccaccctcacacagccccacagcctcgcacactcccacccaccctcacacagccccacagccttgcacactcacacgcatcctcacagccccccagcctcacacactcccacccaccctcacacagccccacagcctcacacacatccatcttcacaagtctcatacccttcacatcacacacattgttgcacaaatgcagactcacacattcacacaggaacacacaaccacatgctcacacctataggcactcacactcacagtctcacagtctcacacattctcacacacatgcgtacacacacacattctgcaaacacccgtggcctcctctgccttcgccccctcccaaagctgcctgaagactctccagatgtcacctactgctgctgctgtggcctgagcaggaggggagtgcagaaggggaggctgggtgggaggggagcaggggcccgaagatgccccaaatccctctgcttcatgactagccccatttagagagaggatcaccctttgaaaaccagaacccctcaacgccagcaccccctgggtctccgggatgaggaggaccaggaaaaccctcccagacaaaggaatggctccaagcctggagtgatgagggtgcctgagattctttgctttttgttcattcattgattcatcttgcatgttattattattttgagacagagtctcactctgtcacctaggctgcaatgcagtgacaccatctcggctcactgcaacctctgcctcccgagttcaagcgattcccctgcctcagcctccctggtagccgggaccacaggtgtgcgccaccacacccagctaatttttgtatttttagtagaaacggggtttcaccatattggtcaggctgttctcccactcctgacctcaggtaatctgcctgcttcagcctcccaaagtgctgggattacacgcatgagccactgtgtcaggcctgatttttttttttttttttttgatggagtctagctctgttgccaggctggagtgcagtggcacaatctcagctcactgcaacctccacttcccagattcaagcaattctgcctcagcctcccgagtagctaggattacaggcacgcactgccatgccaagcgaatttttgtatttttagtagagacggggtttcaccatgttggcctggatggtctcgatctcctgacctaggatctgcccgactcggcatcccaaagtgcagggattacaggcgtaagccaccgtaatttttgtatttttagtagagacggggtttcgccatgatggccaggctggtctcgaactcctgacctccagtgatccacccgcctcagcctctcaaagtgctgggattacaggcgtgaaccactgcaaccggctcatcttgtatattagatccagcggtttctgtgtgtcccactctgtccacgccactgggggcaccacagcacccaagacagaaatccccacctacatggggctgatgtccagtggagagtcagacataaacaaaagtatggatgtgcatgtgtgacagagagaagcctcaacaagggatataaagggggaaaaaaagagctgagcccagtggctcatgactgcaatctcaacactttgggaagccgaggcaggaggattcgctggagcccaggagttcaagacaaatctgggcaacatagcaagaccccatctctacacaaaatttaaaaaattaaattgggccgggcgcagtgactcacacctgtaatcccaacactttggtaggctgaggtgggcggatcatttgtgggtcaggagtttgagaccagcctggccaacatggtaaaatgctgtttttactaaaaatacagaaattagctgggcgtggtggtgcacacctgtaatcccagctactcaagaggctgaggcaggagagttgcttgaacccagctgggcgtgatggctcacacctgtaatcccagcacttcaggaggccgaggtgggcggattacctgagatcaggagttcgagcacagcctgaccaacatggtgaaaccccgtctctaccaaaaatacaaaattagtcgggcatggaggcgcatgcctgtaattccagctacttgggaggctgaggcaggagaattgcttgaacccgggaggctgaggttgcagtgagccgagttcgcaccactgcactccagcctgggcaatatgagcaaaactctgtctcagaaaaaaaaaaaagaattgcttgaactcaggagatagaggttgcagtgagccaagattgcaccactgcactccaactgggtgacagagtgagactccatctctgaaaacaaaataaaataaaaataacaaagaaaaccagctgggcatgttggcataaccgtagtcccacctacttgggaggctaaagcgggaggattgtttaaactcaggagttgcaggctacaatgaactaagatcgcgccactgcactccagcctgggtgacagagagaaactctgtcccaaaataaattaaattaaatttgccaggcgcagtggctcacgcctgtaatcccagcactttgggaggctgaggtgagcagattgcctgaggtcaggtgttagagaccagcctggccaacatggtgaaaactcgtctctactaaaagtacaaaaattagccaggcatggtggcgggcacctgtaatcgcacctactcaggaggctgaggcaggagaattggcttgaacctgggaggcagaggttgcagtgagccaagatcgagccactgcactccagcctgggtgacaagagcaagactctgtctcaaaaaaaaaaaaaaattaaattaaattaaaacccaaaaacagtggagtctgggcctctcaggctgggtgcaccccaggggacttcctctctgatagtctccttgccctctacacctaacctggcctctacacctgggacccctgttccctgaggccccacccataaccacatccacgtctggtgggatccagcacctaagtccgctctagtggacggcactccttccccgagtccccactggcgaggaccatgagcaattcaatcccattctccacccagagactttgctggaaaagagctaattatatctctgccccggagcccatctggtggggtctgggtggtgacgggcgagtgtgttccgcgtccacggccggcggcacgcgcacaaacacagcttcccatatatttttaattccacagccatactttgattagagagccgatgtgttgtgtacgacctcagggacctcattatttttctaactcaaataaatacggcgttcagaattcggggagggttggagggggtgtggagtaaaagacgcagaaaactccatctataaaaagaattcaggccttaatgagcttttaaaacttgccaacctctctcccaccccctgacaccaatctataaacaggagccatgcctgctggctttgatggtgggagtctaggtgggtgaggattggctggggtgggtgttgcggggcaaagccacagcaggggagaggcccccctgcaaaggtagctgggtgtctgtaagatttggggaagggggatggcaggcacagtggctcatgcctataatcccagcactttgggaggctgaggcaggaggatcgcttgaggccagaagttggagatcagcctgagaaagatagcaagaccctatctctacaaaaaaatttaaaaattagcctggcgtggtagcgtgtgcctgtagtcccagctactctggaggctgaggtaggaggatggcttgaaccctggagtttgaggctgtagtgagcttagattgtgcctctgcactccagcctgggtgatacagcaagaccctgtctctggggaaaaaaaaaaaaaaaaaaaaaatatatatatatatatatatatatatatatatacacacacacacacacacacacacaccatacatatatataaaaacataaatatatacatatatacatatatagacatatacatatatagacatatacatatatacacatatacatatatacatatacatatacacacatatacatatatacatatatatgtgtatacatacacatatatacacacacatatatatacatatatatatatatatacacatatatatatatacacacacacatatatatatatatatatttgggcaagtgtgttcccagccacagggagaatggaagtggtctctatccaagttcagcaggaatcgtcaatattcatgggcccaggctaactggggtgttgatctgagaaagatttagaatttcctgatctcctagacccatttgggctgtggtatgaggatgagttctgcttcattattattatttttgagacagagtttcgctcttattgcccaggctggagtgcagtggcacaatctccactcaccacaacctccacctcccgggttcaagcaattctcctgcctcagtctcccaagtagctgggattacaggcgcgtgccaccacacctggctaatttttgtatttttagtggagtcagggtttcaccatgttggccaggctggtcttgaacccctgacctcaggtgatctgcccgcctcggcctcccaaagtgctgggattacaggcgtgagccactgcacccggcctctgcctcattcttgtatgtctggaaattcttccccagaggctcccctgggagttgctgagatgagcagatggggaaactgaggcagagcaaagcaggctggaccacaggatatgtattgggtgccctccccacccacttggagtcagctagaccccaccttccttcgcagtggataagccctggctggggttgggggttccccgttgagcaggcaccagccgaaggaggccccccagtggccgtggtgttacggtgaggtggacggagagcaggcagtgaccacggggctcccgaaaggacagggtgaccttcgagtcactacccatgtgcatcgttccaacagcagcaaagacactcccggagcaggcagcaaagccaatttcaggtgaaagatgagttaagtgggcagaaatgagctccgggctgagaaatttctgcatgacaaaaattccagggagcaggacagaccttaggagcagctgagcaagagcctctggaaggactcagggggataggaggggagggaagggatgaaaaacaagatcgggacatgcaataatgtggtgaatgggggcaggaagggggcaggaagatactggggtctgcacaatgcggggagaggggttttccctgcccctcaatctgaaatggcagcccctgtctcttgcttttccccctaccctctccctgctgttgttttctatttatttatttatttatttttgagacagagtttcactcttcttccccaggctgaagtgcaatggcgcaatcttggctcacctcaacctttgcctcctgggttcaagcgattctcctgcctcagcccccagagtagctgggattacaggcacacgccaccacacccggctaattttgtatttttagtagagtcagggtttctccatgttggtaagtctggtcttgaactcccgacctcaggtgatctgccagtctcggcctcccaaaatgctgggattacaggtgtgagccaccgtgcctggctgttttctttatttctttgattttagagacaggatctcactctgctgcccaggctggagtgcagtggtgcaatcatagttcactgcagcctccaactcctggtctcaatccatcctcctgcctcagcctcccaagtagctgggactacaagtgtgcaccaccacgctcagctaatcttttaatttttgtagagatggggtctccctatgttgcccaggctggtctcaaactcctgggctcaagcgatcctcctgcctcggcctcccaaagtgctgggattacgggtgtcagccactgtgcccagcttctgctatagttttctgtttgagatttcttcatcaccctctgtcatgatgtttgtcatccgcctctctcatcagactggccacctaccttgccccacctgaaggcagagagtttcgtctgtcttcctgaaaggtaggcagaaagatgtcagctgggaggggccttctagatgggtgtaaacagtggtgtgcttgtgaacctgttgtggggagagaagaggatttgtagtgtttgccaattccagcggtgtaaattctgccaccttggctgacttcaagctgtgaatgtaagatttccttgacagggtgggggaagtttgagggggcaaggggattgtgaggtggtgtccagatgggtgtaatcaatgatgagccggtaagccagctgcagagaggagacccaatttgtagtgtttgccaatttccatggtgtaaattcttcccccttggctgaattcaagctatgagtgtgatgccactgaatcccaacttaggaagagattgcataatgaaatgactcttgtgagccactttgacccagctcaagtataccgtggggtggaatctcctggcctggagttgaccctttctccagtttgggattaggaggaagggaagacaagtaagagggtgaagccagtctccctgtcttccttccatcctggggccattctactccctgggacctctgctggggatgctcttccatcagatactgataactgagctgtccccacccattctgcatagaccccatccagggcccctgctgggaaaccaagagtttgtccaagtggcgacatggggacccctacccactgctatctttgctgcctctttttttttgagacagagttttgctcttgttgccaaagctgcagtgcagtgatgcgatctcggctcactgcaacctccgcctcccaggttcaagtgattctcctgcctcagcctcccgagtagctgggattacaggcgcgcgccaccacacctggctaatttttgcatttttagtacgaatggggtttcaccatgttggccaggctggtctcgaactcctgatctcaggtgatccgcctgtcttggcctcccaaagtgctgggattacaggtgtgagccaccatgctcagttgccttttttttttttcctttttcttttttttttttagggacggggtcttgctgtcacccaggttggagtgtagtagtgtgatcatagcacactccagcctcacactcctggactcaagggatcctcccgccttagactctggagtaactgagactactggcacgctccaccatagccggctaagttttttagtttttgtagagaaagggtcttgcattgttacccaggctggtctcaacctcctggcacaaacgatcctcccacctcaccctctcaagtagctgagactacaggcatacactaccacacccggcttttatggatttttaaaactgattcataatagaggtacatattttcagggtacgtgatattttgatacattcatatcatgtgtagagatcaaatcagggtaattgcagtatccatcatcttaaaggtttatcttttctttatgctaggaatgctcaaaatagctctcctaccttttttttttttttttttttcgagacagagctttgctcttgctgcccagtctggagtgcaatggtgcgatctcagctcactgcaacctccacctcccgggttccagccattctcctgcctcagcctcccgagtagttgggattacaggcaagcatcaccacgcctggctaatttttgtatttttagtagagacagggtttcaccatgttggccaggctggtctcgaactcctgacctcaggtgatccgactgcctttgcctcccaaagcgctgggattacaggcatgagccaccatgtctggcctctcctagctattttgaaatgtataatggattactgtttactgtagtcaccctactgatctatcaaacactaagtcttgtgtgctcaagagcagtgtgagcacccagctcagctgtctgagcttggccctgtcactttccctcctggagcctcagttttcccttctgtgaaatgggtatatattagtgcctgcctctaatacagtgttgtgaggcttcaggaagggagtatttggttcctgtacctctagagcaggggtttctttcctctcttttcctttctctcttttgctctctcttttttttttttaaacagagtctcgctctgtcacccaggctggagtgcagtggcatgatctcagctcactgcaacctctgcgtcccgggttcaagtggttctcctacctcagcctcccgagtagctgggattacaggcatgtaccaccacacctggttaatttttgtatttttagcagagacgggatttcaccatgttagccaggctgatcttgaactcctgacctcaggtgatccactcgtcttggcatcccaaagggctgtgattacagttgtgagccaccaaacctgacccttcctctctccttccttccttcctttcctctcctccttccctccttcctttatttctctcttttttttctttctctttctttctttctttctttctttctctctttctttctttcttttttctttccttctttctttctatttttctttctttctctctgtctctctctcctttctttctttcttctttcggtcttgctctatcacccaggctggagtgcaatggtgcaatcagagctcactgcagccccaaactcctgggctcatgctatcttcccacttcagcctctggagtagctaggactacagatgcacgccaccaggcctggctaatttttttttttttttttttttttagagacagagtcttgctatgttgcccaggctggagtttcttgacctgagcactgctgacatttggggctgggccattctttgttggggggtcctgtcctgtgcattggtggatgtttagcaggatcccaagtcgcaacaaccctaaatgtctccagactgcagggacgcaggcaaccacacagggaggaagcggagagtcaatgctccccacctctctcctctgccttctaaccttcttttgaggctttctattggctgaacctaactgaagccagaggacaagggagctattaatgggttctttgtttgtttgtttgcttttgagacagagtctcactctgtctcccaagctggagtgcaatggcatcatctcggctcaccgcaacctccgcctcctgggttcaagccattcttctgcctcagcctccagagtagctgggattacaggcatgggccaccactcctggctaattttcaggttttgttgttgttgttgtttgtttgtttgagacagagttttactctgtcacctaggttggagtgaagtggtgcgatctcagctcactgcaacctctgcccccagggttcaagtcattctcctgcctcagcctcccgagtaactaggattacaggcatgtgccaccacgcccggctaatttttgtatttttagtagagctgggatttctccatgttggccaggctggtctcaaactcctgacctcaagtgatccacctgcctcagcctctcaaagtgctgggattacaggcgtgaggcactgtgcctggcaatgggttcttacatatcagcctcctaggcatggaacagggcggaagaagatgaagagtggcccatatcccaaagatacaccgctcagttttccttattcccctctgcatgcaaagacttcagacttccatcactgtctgaaggctgtcccgatcagctcctgccccactgcccctctgtcactcacgggtgtctcccccgtgaatctcttgtactttcttttttttttttttttttttgagacggagtcttgctgtgtcgcccaggctggagtgcagcggcgcgatcttggctcactgcaagctccacctcctgggttcacgccattctcctgcctcagcctcccgagtagctgggactacaggcgtccgccaccacgcccggctaatttttttgtatttttagtagagatggggtttcaccgtgttagccaggatggtctcgatctcctgacctcgtgatctgcccgcctcagcctcccaaagtgctgggattacaggcgtgagccacggtgcctggccgaatctcttgtactttcaactccatctcagcatcagcttctcagaggacctgaactgatgcaaggggcacgtcttcgtcagcttggactgtgtattagtcaaggctcgccagagaaacagaaccaataggatatatatagatacagagaaggagatctattatgagagattgactcatgtacttatggaggctgagaagtcctacaatctgccatctgcaagctggagactcaggaaagctggtggtgtgattccagcccaaactcaaaggcctgcacaccaggagagcagatggggtaagtcccgggtccgagaccaaaggcctgagaaccaggattgccagtatctgaggacagaagaaaacggatgtcccagctggagcagagagaatgaatttaaccttcctctgccttttggttctagccatgtcctcaatggattggatgatgcccacctacattagggagggtggatcttctttcctcagtctactaattcaaacactaatctcttccagaaagcctcacagacacaggcagaaatcatgtttcaccaggtctctgggtaccccttagttaagttgataacgcagaataaacatcacaggctgccataagaaaatacgataaattggctgggcgcagtagctcacacctgtaatcctagcactttgggaggccgaggcaggtggatcacctgaggtcaggagttcgagaccagcatggccaacatggtgaaaccccgtctctgctaaaaatacaaaaattagccgggcatggtgttgggcacctgtaatcccagctacctgggaggctgaggcaggagaattgcttgaacccaggacgtggaggttgtagtgagccgagatcatgccactgcactccagtctgggcaagagagcaagactttgtctcaaaaatgacaacaacaaagaaaataccatagactgagtggcttaaacaacagaaatttccttctcacatttatagaggctggaagtccaacagcaaggtgtcagcagagttggttcctggtgaggactctcttcttggcttgcagatggccgccttcttgctgtgtcctcacatggcctttcctctgtgtgcttgaagagagagagagatctctggcatctcttcctttccttataaggacaccagttttattggattaaggcctcaccctgatgaccccatgtaactttcattacctctttaaaggccctatgtccaaatatagtcacattgggggttaggacctcaccattttaatttggaggggcacaattcagtccataatgggacaaatgaaaaacattcagcacacagccagcctgcaagctccccagttacatatagactcacagacctttcatgaatagtggctggatcccctcattactttgtagttcaacgacaggaggactggagtgggggtctgctgggctgcatgcagtggctagtatatgtatggatggggtgtttgggatggatgtcagaagccccccaaaggtgtaattgatgcaggacagtgttccagagctgaagatcatcccccacccccatgacatgggttcccagcccccctgcccatcaaggttgtccagaggcagctgcataaggaacaagaaagccccagcgggtggtgcaccagcccagttctccacctctccaagtccaagctgagcagacatgggtgactgctttctggttctatatttggtcaggaggaggatttcctgtccttgaaaaaattcctgagatcctgggaagatgtgaaagccatggcaatttgaggggggcagggaggggaaggaattgtatgcagacagttcagctcaaatgagaggaggacaactaggaccccaagttgcaaagtctggctgcaaaaccagaagcttgtgatggagccccacaccccagggagacaggagagcatggtaggtgtatatttaaattaaatccagcagtccaggcacggtgactcacacctataatctgggcactttgggaggcaaggcgggcagatcacttgagttcaggagttcaagaccagcctggccaacaaaaggaaaccccatctctaataaaaatagaaaaattagccagatgtggtggtgcacacctgtaatcccagctacttggaagactgaggcaggagaatcacttgaacccgggaggcagagtctgcagtgagccgagatcgcaccactgcactccagccagagtgagactccatgttaaaaaaaaaaaactgctgagcaaggtggctcaaacctgtaatcccagcactttgggaggcagaagcgggcagatcacttgaggtcaggagttcgagaccagcctgggcaacatggtgaaacccccgtctccaaaattagctgagcatggcagtgcgcttctgtagtcccagctactcaggaggctggggcaggagaattgattgaacccagaaggtggaggttgcagtgagccgagatcacgccactgcactccagcctgggcatcacaacgagaccccgtctcaaaaaaaaaacaaaatccagtaaacagttcagacatggtggctcatgcctgtagtctcaacactttgggaggccaaggcagtagggttgcttgaggccaggagttcaagaccagcctgggtaacatagtgagaactcgtctctacaaaaaatttaaaaatcgctgggcgcggtggctcacgcctgtaatcccagcactttgggaggctgaggcaggcagatcacgaggtcaggatatcgagaccatcctggctaacacagtgaaaccctgtctgtactaaaaatacaaaaaaattagctgggcgtggtgacaggtgcctatagtcccagcttgtcaggaggctgaggcagaagaatggtgtgaacccgagaggcggagcttgcagggagccgagattgcgtcactggccactgcactccagcctgggcaacagagcaagactctgtctaaagaaaaaaaaaatgtaaaaatttagccaggtgtgttggcagatgtctgttgccccagctgattatgtgagtttgagactggaggatggcttgaacccaggaggttgaggctgcagtgaactatgatcacaccattgtactgcagcatgggcgacaaaatgagaccctgtctcaatcaatcaatcaatcaatcaataaaatagaaattgccctttaagctaggcacagtggctcacatctgtaatctcagcactttgggaggccaaggtgggaggactgctcgagctcaggagatcaaggctgcagtgagctatgattgtgtcactgcagtccagcttgggcagcagagcaagaccccaactcaaaaaataaaaattaaaattaattcattaaattcagtaaacaaaacagacaaagtcccttgtcctcacagagacaacattccagtgggggaaggcgacaatgagttagttaaataaaataagtggtaggttcaacaaggaaaataaagtaaagaaaaaaataggctgggcccagtggctcatgcttgtaatcccagcactttgggaggccgaggcgggcagatcacaaggtcaagagattgagaccatcctggtcaacatggtgaaactctgtctctactaaaaatacaaaaaaaattagccaggcgtggtggcatgcacctgtagtcctagctacctgggaggctgaggcaggagaattgcttgaacctgggaggcagaggctacagtgagctgagattgcaccattgcactccagcctgggcaacagagtaagactccatctcaaaaaaggaaaaaaaaaaaaaaaaaaaaagcaagggagacaaacaggaagtgctgaggatcggggttgcaattttaattgggtgtccagggaaggcctcactgggaaggtgactcctttttttttttttttttttttttttgagacagtctcgctctgttgcccaggctggaatgcagtggcccaatctcagctcactgcagcctctgcctcctgtgttcaagcgattctcctgcatcagcctcctgagtagctgggactacaggcacgcgcctccatgcctggataatcttttgtatttttagtagagacagggtttcaccacgttggccaggctggtcttgaactcctgacctcgagcgatctgcctgcctcggccacccaaagtgctgggattacgggcatgagtcactgcgcctggcctgaaggtgactcttgagcaaagagttgaaggaggtgagggagttgtattagtcagttatggctgcctaacaaattgccccacccccaaaatctcagcaacatggattatctcacagtgtctgtgggtcagaaatctggatgtggcttagggccactcacaagtctgtagtcaaggcatctgctgggctatagccttcccaaggttcaactgggaaggacccacttccaagctcacacatgtggctgttgtcagaattcagttccccactggctgttggctgaaggctagtctcagttccttgacacgtgggtctctccaaagagcatctgagaacatgggcactgacttcatcagagcaagccagccagtgggcaagacagagtgctgacaagaaggagggaattcagcaggacagacatcatggttttgttttgttttgtttgagatggagtctcactctgttgcccaggctggagtgcagtggcgcgatctcagcccactgcatcctctgccttctgggttcaagcgattctcatgcctgagcctccccagtaggtgggactacaggcaccaacacacccggctaatttttgtgtttttagtacagacggggtttcaccatgttggccaggctggtctcgaactcctgacctcaagcgatctgcctgcctcagcctcccaaagtgctggcattacaggcatgagccaccatgcccggcccagacatcacggtcttttataacctaatcttagaagtgacatccatcatttttgccatgttctttggttagaaaggagcccctcggctgggcgcgatggctcatgcctgtaatcccagccctttgggagaccgagatgggtggatcacctgaggtcaggagttggagaccagcctggccaacctagtgaaacttcatttctactaaaaatacaaatattagctgagcgtggtggctcaagcctgtagtctcagctactcgggaggctgaggcaggagaatcacttgaacccgggaggctgaggttgcagtgagctgagatcacgccgctgcactccagcctgggtgacagagtgagactctgtctcaaaaaaagaaaaaaaagaaatgagttgctagatccagcccacactcaaggggaggggattagacaaaggcctgaaggccaggaggcagggacccttggaggctgtcttagatactgcctcccacagcaaccatcagggggaacagcattccaggcagaaggaacggcaagtgcaaaagccttgaagcaggaacaagcgaagccatgtggtcaggacaagagggagtgcagtgtggctggagcaggaatttgggggcgggagagttagaacatgaagacagagaggccagcagtggtcctggggaccctatgagaagtaactttctgaattttttctaagaaccatgagaaaccacagtgcaatttcaagccaacacatgatgtcatctgatttaagattcctacgatacctactgaagtaatatggtatctggtatttgatttaagaaatctctttttttttttgagatggggtatcgctctgtcacccaggctggagtacagtggcacgatcttggctcactacaacctccgcctcccaggtacaagcatttctcccacgtcagcctccaagtagctgggatgacaggggtgcaccaccacacccagctaatttttgcatttttaatagagacggggtttcaccatgttggccaggctggtctcgaactcctgacgtcaggtcatccacctgtctcggcctgccaaagtgctgggattacaggtgtgagccgccacaccccactgaaagctcattattctaaaagttgggtgagcagggcacagtggctcacgcttgtaatctcagcaccgaggtgggaggatggcttgaggccaggagttggagaccagcttgggaaacatagtgagaccccatctttacaaaaataaaaaattaacacacctgtaatcccagctgaggcgggtggatcacgtgaggtcaggagttcgagaccagcctggccaatgtggtaaaaccccgtatctactaaaaatacaaaaattagcccagcatggtggcacactcctgtcatcccagctactcaggaggctgaggcaggagactcatgtaaacctgagaggtggaggttgtaatgaaccgagatcaccaccactgcactccagcctgggcgacaaagagactccatctcaaaaaaaaaaaaaaaaaaaaaaaaggccaggtgcggtggctcatgcctgtaatcccagcactttgggagaccgaggcgggcagatcacgaggtcaaaagagcaagaccatcctggccaagatggtgaaaccctgtctctactaaaaatacaaaaaattagccgggcgtggtggcgcatgtctgtaatcccagctactcgggaggctgaggcagaatagcttgctcatctgctgctggtttgcatgtgaaatggcacaaccactttggaaaacaatttttatttttatttatttatttttaagacggaatcttgctctgttgcccaggctggagtgcagtagcacaatatccgctcactgccacctccgcttcccaggttcaagcgattctcttgcctcagcctctggagtagctgggactacaggcacgaaccaccacgcccagctaattttttgtatttttagcagagacggggtttcaccatgttagccaagatggtctagatctcctgacctcatgatctgcctgcctcagcctcccaaagtgctgggattacaggcgtgagccaccgcgcctagccgggaaacagtttttaaaataaagttacattgggaggccaaggcaggcagattgcctgaggtcaggagttcgagaccaatctggccaacatggtgaaacctcgtctctactaaatatacaaaagaaattagccgggtgtggtggtgggcacctgtaattccagctactcatgaggctgaggcaggggaatcgcttgaaccagggaagtgggggttgcagtgagccaagatcatgccactgcaggccagcctgggtgacagagtgagactccatctcaaaaaatatataaaataattaattttaaaaaataaagttagacttaccattcatcccagcaattccattgctatacatttacccaagagaaaagaaagaatatatccatataaagacttgttggcaaatgttcatagcagatttgttcaattattgctgaaaaactggaaacaatcaaaatatctacagacaggagaatataaattaaggcccatccataggatgtagtaattcttagcaacaaaaaggaacaaactactgattcacacaatgttgataaatctcagaatgcatgatgctgagtggaagagagaccacactgtgtgattttatttatctgaaattttgcaaaaggctcaactaatctaaggtgatagaaatcagaatagtagccaggtgcagtgactcacgcctataatcccagcactttgggaggccgaggtgggcagatcacttgaggccaggactttaagaccagcttggccaacatgtcaaaaccccatctttacaaaaaatacaaaaatcagcggggtgtggtggcgtgtgcctgtaatttcagctactttggagactgagacatgagaatcgcttgaccctgggaagtggagggtgcagtgagctgagatcgtgccactgcactccagcctgggcaacagagtgaaactgtcacacacacaaaaagaattcaggatagtgggccccaccctatggctcacacctgtaatctcagcactttgggaggctgagacaggaggatcgcttgaggccaggaattcaacatcagcctggataacagcaagaccctgtctgtctctacaaaaaatacaaaaattagctgggcttggtggtgagggcctgtagttccagctactcagaggctgagacaggagaattgcttgagcctaggaggtagaggcttcggtgagctatggttgcaccactgcactccagcctgggcaacagagcaagaccctgtttctaaaaagaaaagaaaagaggccgggcacggtggctcacgcctgtaatcccagcactttgggaggccgaggcaggcggatcacgaggtcaggagatcgagaccatcctggctaacatgatgaaaccccgtctctactaaataatacaaaaaacaattagccggacgtggtggccggcgcctgtagtcccagcttgtcgggaggctgaggcagaagaatggcgtgaacctgggaggcagagcttgcagtgagccgagatcgcaccactacactccagcctggctgacagagcgagactctgtctcaaaaaacaaaaaacaaaaaaaaaaagaaaagaaaagaaaaatcaggccgggcctggtggctcacacctgtaatcccagtgctttgggaggccgaggcgggcggatcatctaaggttgggagtttgagaccagcctgaccagcatggtgaaaccccatctgtactaaaaatacaaaaattagctgggcatggtggtgcatgcctgtaatcccaactactcaggaggctgaggcaggagaatcgctagaacccgggaggcagaggttgcggtgagcccagatcgtgccattgcactccagcctgggcaacaagagcaaaactccatctcaaaaaaaaaaaaaaaaaaaaaaaaaaatcagtggagtggctgtgggtggggaatggatgaagggacattgatttctgggccgtctgaatggaagtgttccttactttgatggggtggggacacggggtcgtgcatgcaaataatatgtgcaggcttgggacttcaccgcatgtaaattaactctcaataaagttccaggaaaagtaattccaattccagcaaccggattttgggctcagttcggaggctagcctgcaagccttgctggtgggtggcctgtaggggtgacaggaaaccccccgggcctccgctctttaggggagggggagcctcgcccttgcccccctccgggacgagcgggcagatctaaaagcttccctaccgccgcccaggcggtcgatagcagactcccaggctccgtttctgcctgcccggcagcccgggcccttcccgccagcccagcccctgggaggggacccgagccgggcggagcctcctccggagccgcacgccgggctcggctcaccctccccggatgccgctcctcctccatccccagaagtttcagccactgagattccccttgtcccggaggctggaggggaagacccaggcggctgcgctttggaggctggaccatcgtggggcttgtctgtgcccacttttcccccattcaagagttaccactgccaggcgcagttgctcaggcctgcaaacccagcactttgggatggcaagacaggaggatcgcttgagcccaggagcttgagaacagcctggacaacatggtaagaccgcatcactatattaaaaaaaaaaaaaaaaaaaaaaaaaaaaaaaaaaggctgggcgcggtggctcacgcctgtaatcccagcactttgggaggccaagaccggcagatcacaaggtcaggagattgagaccatcctggctaacacggtgaaaacccgtctctactaaaaatacaaaaaattagccaggcgtggtggcgggcgcctgtagtcccagctactcaggaggctgaggcaggagaatggcgtcaacccaggaggcggagcttgcagtgagccgagatcgcgccactgcactccaacctgggcgacagagcaagactccgtctcaaaaaaaaaaaaaaaaaaaaaaaaagaggctaggtgcggtgactcacgcctgtaaccccaggagtttgtgaccagcccggccaacatggtgaaaccccgtctctactaaacacacacacacacacacacacacacacacacacactcttagccgggtgtggtggcgggcgcctgtaatcccagccactcgggaggctgaggcaggagaattgcttgaacctgggaggcggagcttgcagtgagccaagatcgtgccattgcactccagcctgggctacaaaagcgaaactccgtctcaaaaaaaaaaaaaaaaaaaaaaaattcaagcctagtggattggaaataccactttccctgtcttccttcatcctttccttagtcactatctagacaccctttttactgggagtctgggttacagggttacattaaccagaaccttaaagagaaaaatactgtaattgcaaaaacgaccagccttttaaaatggaacaaaagagactagaaaatatcagaacccactgcacagtagaaatatgactatgacttcctgaaacttttgttttagttccaaacctgggtagaaggcctacgttgcaatgtaaaaaattaattctttgatttgtgatcaaagtgcttgaaagatgtggttatatatgatgtttgaaattggttttcttttttttttaattaatatatcacagaggtcacgctgtgtcaatgaatataagttttagcacttgaattttcttttcttttttttgagactgagccaccttatcacccaggctggagtgcagtggcgagatctcggctcactgcaactttcacctcctgggttcaagcgattctcctgcctcacctcccaagtagctgggattacaggcacccaccaacacatccagctaatttttgtattattagtagagacagggtttcaccaagttggccaggctggtctcgaactcgtgacctcaagtgatccgcccacctcagcctcccaaagtgctgagattacaggtgtcagccaccacacccagcttttaatttccttttctttgttgagacaggttctcattctgtcacccaggttggagtgcagtggtgcgatatgcgctcactgcagcctccacctccttgggctcaagcaatcctcccccctcagcctcccaagtagctggaagtacagacatgtgccaccatgcctggctaattttttagtttttgtagagttgggatctggctatgttgcccaggctagtcttgaactcctgggctcaggcgatcctcccacctgggcctcccaaagtgctgggattacaggcatgagccaccatgcccagcccactttcattttctactatgcatgtagccaatccccagagcccaggtacctccattgtttccagcctcttttaaagcttttcttaatgatggtaacagcaagcatcctctatgtgcctggcagaaggctaagcatttcacacactttgcctcatggagtcctcatgagaggcccattttactgatgagaaaatctgggaaccgtaacaataaaccatatgacttaggtcacacagcttgaaggtggtgaagccagaattcgaaccctggctgtctgattccagagctcttaaccaccctgtgttagttattcttttcttttcttttctttttttgagacgaagtcttgctcttgtcccccaggctggagtgcaatggtacaatatcggctcactgcaacctctgcctcccaggttcaagcaattctcctgcctcagcctcccgagtagctgggattacaggcgcctgccaccacgcccggctgatttttgtatttttagtagagacggcgtttcaccatgttggccaacctggtctcgaactcctgacctcaggtgatctgcccgcctcagcctcccaaagtgctgggattacaggcgtgagccaccgtgcccagcctattctttatagttctccacctatttgactgattatatccctgacataaattcctagaggtggatttgctgggtcagagaatccacatgcttaaaggtttaatactaatatctagaacaccatcccaagaaagttgtatcgtggccgggtgcggtggctgacatctgtaatcctagcactttgggtggccgaggagggaggatcacttgagatcaggagtttgagaccagcctgggcaagtcgtgagaccccatgttacaaaaagtttttaaaaaattagctgggtgtggtgacctgtacctgtagtcagctatttggcaggctgaggtgggaggattccttaagcctaggaggttgaggctgcagtgagccgtgattgtgccactgcactccagcatgggtgacatagtgagaccctgtctcaaaaaattaaaaaaaaaaaagttgtgtcaatttaaactcccatgaccgtgctcaagtgtgcattcccaaaacttcacacacactcataagcttgacaaggaaaagtgattcttcagctgaacggtcagattgagcatctttacagaggtttgttaagctctcactcctttgtgaaccccctattcaagccctgtgccaatttcacatttgggatgtttgtcttttttttcttattgattcatatgtgctttttgtatattaaggctcttaatgatttgtctgccatatacgtggcaaacaatctaatctcccttgatcttttcttttccttttttttcttgagatagagcctcactccgttgcccaggctggaatgcagtggcaccataatagctcaccgcaatcactgcagcatcaacctcctgggctcaagccatcctcctgcctcagcctcctgagtagctgggaccacaggtgtgtgccaccatgcccagataaatttttaaaaattatttttgtagggatggggtctcactatgttgcccaggctggctatctcctctgatctgggactccagctagatctccttttattgcccaactggcctcaatgaacatttctcttctgtctaggcctcattgcaggttgcattttattggcggttcctccagaaacaaaagcagagactttgagatcttatgaacctcagtcttacccagaacacttgaagaacccttcagctttccatggcaagaaagctcaggccctggggccagaagccacggctttgtgtctgggttctgtagtttactgctatggctccagtttctgattcctccaagttaagatgggttggtaaattctgccacgcagaatgcgcttctagccacgcccactgtgtatcaaaccatgcccactgtacataaaccacgccctctcatctagctacgcccaccaatcgtctagccacgcccaccttcgagtggagaggtgtgattagagcattaaagagagaggcgtgattagagcattaaaaagaagtgaagaaccgaaatagtgaggatcctgggccagggggaggaggagggagaagatcccctggcctcgatggctggcaattccttcatgcccctagcacccacctggttaaagaaaggatagctgggcgcaatgactcactcctgtaatcccagcactttgggaggccgaggcaggcaaatcttgaacttgaggccaggagttcaagaccagcctgatcaacatggcaaaaccccatctctactaaaaatacaaaaatcagccggtgtggtcgtgtatgcctgtaatcccagctactcaagaggctgaggcacgagaatcgcttgaactcagcaggcgaaggttgcagtgagccgagatcacaccacttcactccagcctgggcaacaaagcaagactgtctcaaaaaaaaaaaaaaaaaaagaaaagaaaagaaaagaaaaaagaaaaagaaaataaaaaaaagaaagaaggaggcacctggctactgtattccacctttctcctcacccactcttttttttttttttttttttgagacggagtccttctctgtcatccaggctggagtacagtggcaccatctcggctcactgcaacctccgcctcctgagttcaagctattctcctgcctcagcctcccaagtagctgggactacaaacacgcaccactacctccggctaatttttgtatttttagtagagatggggttttgccatgtttttcaggctagtcttgaactcctgacctcaagtggtccgcccgcctcagcctcccaaagtgctgggattacaggtgtgagccaccacgcccggccctcacccgctctttaaaatatccctaccagggtcaatggtttatctgtgcctcagtgttcccatctgtaaaatgaggataattttaaggattacctgagttagcatctgtgaaggggttagaatggtacctggcacatagtaggcactcaataaatggcatcactgatatggttccacggatggttgtattattaataggaataaagtgtgggatggaaaaacgttgctctgggcacctggaaccagccccaggggcacgtggggctctacacaggctctttaccccatgccagcgggaggacactttggggggaaactgaggcactgacaatcccctgccttcccagccctgagtccttctcacccatgcccagagcctcagaggccagcaaggtgccccaagggaaagcgacacttctgaactgcgctgcctggcacaattaccgttttcatcctcattaaactacattttcattctaattagagtttcaccgcctcccagagagaagggccgattacttttcagcatcattaacactggctccctccccactttcctcctcccctgcccaggctcccactacaccagggcattctctctctctctctccttcaccccatggaccagagagaagcaacagaacatttattgtcgcctactgggtgccaagttggatgctaggaaccttcccccacagcctcttcgccttatcttgggctggtctaattttctttttgtccccaacacttacccctttttgtttttgttttgttttgttttgttttgttttgttgagacagggtcttactctgtcgcccaggctggggtgcaggtgcgtgatctcggctcactgcaacctccgcctcccggattcaatcgattctcccacctcagcctcctgagtagctgggattacaggtgcacaccaccacctggctaatttttgtatttttttttagtagagagggagtttcaccaggttggccaggctggtctcaaactcctgatcccaagtgatccgcctgtcttggcctcccaaattgctgggattacaggtgtgagccactgcgcccggccccttttgaacatgctctatgctttatttgttctttttatcctctgtctccccctccccagaatgtcaacacccactcatgtcccccacgcactcctgggcacgctgaccccacagcttctaagaaccagctcccgagaagtggctctggctgctgagtgggtggaaagtatggagaacaaacactctcctggagcagaccttgagcaatggctgatgggagttggtggataaatatcccagctccctcgcccctaggtgggcaccctctgaagagtgtgctctatttgatttcagcattctccagcataattgagttgcccacagtggaaactggctcataaacacccttcattggctacctgcccttcccttcctcactctccttctcccctacccatgcttactgagatcatctctcagatcaaccatatcctagatctcccagcccctttggagttcaggcaaaccagagagggactcaatacccaaggaacaggttaagaaagcctctgcaaagccaggcacggtggctcatgcccgtaatccagtgctttgtgaggcagaggcaggaggatcatttgaggccaggagttcaagaccagcctggccaacatggtgaaacctcatctctactaaaaatacaaaaattagctgggcatggtggctcatgcctgtagtcccaactagttgggaagctgaggcaggagaatcaattgaacccaggaagcagaggctgcagtgagccgagatcatgtcactgcactccagtctgggcaacaaagcgagactccatgtcaaaaaaaaagaaaaaaaaaaaaagaccagcctgggcatcatagtgagatcccatctctaaaaaaaagaattggccgggtgtggtggctcacgcctgtaatcccagcactttgggaggccgaggtgggtggatcacaggagattgagaccatcctggctaacatggtaaaaccccgtctctattaaaaatacaaaacaaaattagcagggtgtggtggcgggcgcctgtagtctcagctactcgggaggccgaggcaggagaatggcacaaacctgggaggcggagcttgcagcgagccgagattgtgccactgcactccagcctgggcgacagagcgaggcttcgtctcaacaacaacaacaaaagaattagctgagcatggtagtgcatgcctataggcccagctatttgggaggctgagatgggaggatcacttgagcccaggagtttgaggctgcagtgagctatgatcgcaccactgcactccaacctgagtgacagagagagaccccatcttttaaaaaataaaataaaacaaaataaagaaagcctccgcacctctctcactctggacaaaaccactattatgaccagaatgcagcatcactgggcagctatgacctatatttgaaatacattcttagaaaggttccatttggaagggagtgcaacgtgcacagcacttttggggagcaacttggcagagtgcattaaaacatgaagtgcaggccgagtgcaatggctcatgtctgtaatcccagcactttgggaggctgaggcaggtggatcacttgaggtcaggagtttgaagccagcctggccaacatggcaaaaccctgtctctactaaaaatacaaaaattagccgggcttggtggtatgcgcttgtagtcccagctactcaggaggctgagacaggagaatcgcttgaacccgggaggcagaggttgcagtgagccaggatcgcaccactgcactccagcctgggcgacagtgtgagactccgtcccaaaaattaaaaaaaaaagtgaagtgcagccaggtacagtagttcacgcatgtaatcccagcactttgggaggccaaagtgggaggatcgcttgagcccaggggttcaagaccagcctgggcaacatagcaaaaccccgtctctgcaaaacaatatacaaaattagccaagcatggtggtgctcacctgtagtcttagctacttgggagactgaggtgggaggatcccctgagccctggatattgaggctgcagtgagctatgattgcaccactgcactccagcctggacaacagagcaagaccctgtctaaaaaaaaaaaaaaattaaataaataaataaagacaccagccatattggatttagagcccaccctaatccaatgtgacctcacattaacttaactgattatatctgcaaagaccctgtttccaaataattcattcaggagaacccagggttacgacttcatttttttttttttttgagacactctcgctctgtcgcccaggctggagtgcagtgacgtgatctccactcactgcaacctctgcctcctgcatgccaccatgcccagctaatttttgtatttttggtagagacagagtttcaccatgttgcctaggctggtctcaaactcttgacctcaagcaatccacccacctcagcctcccaaaatgctgggattacaggcatgagccactacactcagccttctgttttttgttgtttgtttgtttgtttgtttttaatagagatagggtcttgctgtgtttttaatagagatagggttgcccagaccaacctcaaactcctggcctcaagcaatcctcctgccttagcctctcaaaattcaaattatagcctgggaacaggcatgagccaccgcacctgaatcaacatatctttttttttttttccgagacacggtctcgctctgtcacccgggctggagtgaaatggtgcgatctcggctcactgtaacttctgcctcccgggttcaagcgattctcctgcctcagcctcctgagtagctgggcctacaggcaagtgccaccacgcccgggtaatttttgtatttttagtagagacggggttttgccatgttggccaggctggtctccaactcctgacctctggtgatctgccggccttggcctcccaaagtgctgggattacaggtatgagccaccgtgcccggtcgatagccccattttacagacagaaaactgatacccaggtacatggattccctgtgagcagatcacaccgctggtaagaggcagagctggtctcagtggctgctgagcccttacgtgtatatgacatgaaacgcacatggtcatttatgtattccaacaaccttgcaaggcagaaaataccttcatgttatagatgaggaaacggaggcaaggagcgagtaagcaacttgcctgaggtcaggtgggtgccagagcagggacttgagcctcggtagctgaccatgggaccctctgggggaccacgggctccatctcctgggcgttggagtgagggtctctttcagcacaaatgttccatagccatagggagaaacagggactgcagcctagtcccccaggactgggccagggagaagccctgactggttaagaccttccaggtaggctgggcgtggtggctcacacctgtaatcccagcactttgagaggccaaggcaggcagatcacgaggtcaggagttcgagaccggcctgggcaacatggcgagactgcatctcaaaaaaacgacaaaagacgtttcaggtggcgctacccataggccctgctcttggtccaggcagcaactgccacgctctggggaccccagtcagcttctaggtatttcagagcctgaggatctaccagagccgctctcaccgcacagggggtttttaatgaatgctaattaatatctgtgttcacagagccagccaggcccctgggcctggagcatccacaggaggaaagtacaagaaccctggcaccctgccaagcagcagggattcttcagacacccaagggctggtttgctgggaaggactcatgtgaccagaaggggaaactgaggcactgctgagcaccaacagtcctggagagctttaagaatggttgccatctgaggccaggcatggtggtttatgcctgtaatcccagcactttgggaggccaaggcaggcaaatcacttgaggtcaggagttcgaggctgtcaggcctctgagcccaagctaagccatcatatcccctgtgacctgcatatacatccagatggcctgaagcaactgaagatccacaaaagaagtgaaaatagccagttcctccttaactgatgacatcccaccatcgtgatttgttcctgcccaaccctaactgttcaactgactttgtgacaatataccctccccgcccttgcaataatgtactttgtgatattcccccgcccttatgaatgtactttgtaggatacaccctccccacccttgagaaggtagattgtaatattctccccacccaacttgagaatgtactttgtatgatccaccccctgcctgcaaaaaaattgctcctggctgggcgcggtggctcatgcctgtaatcccagcactttgcgaggccgaggtgggtggaccacgaggtcaggagatcgagaccatcctggctaacatggtgaaaccctgtctctactaaaaatacaaaaaattaaccaggcatggtggtgggcgcctgtagtcccagctacttgggaggctgagccaggagaatggcgtgaacctgggagatggagcttgcagtgagccaagattgcgccactgcactccagcctgggcgacagagcgagactcagtctcagaaaaaaaaaaattgcacctaactccaccacctatcccaaacctataagaactaatgataatcccatcaccctttgctgactctcttttcggactcagccctgcctgcacccaaaaaaaagctttattgctcacgcaaagcctgtttggtggacccttttcacacggatgcacgtgacagagaccagcctggtcatcatggtgaaaccctgtgtctaccaaaaatacaaagattagccaggcatggtggtgcacacctctaatcccagctacttgggaggctgaggcaggagaatctcttgaacccatgagacgggaggcagaggttgcagtgagctgagattgtgccactgcactccagcctgggcaacagagtgataccctgccctgtccccttcccaccacaaacacacaagaatggttgccatttgaaaggaacaaagaaatgggtattggagaccccagagccatcagcttccacaagagctctggacctcaccccagcctcagcttcctcatcagtaaatgggaacatgaattcctttccttatatgtagtaggcataagaactcattaagcatttatgcatgtgaaatgctttgcagataatcagtttccaataggtgttaactccctttccctgactgtgcctcagttttcctcttgggcatacaagaagctggcagggctttgaggctaccctctgggagagctttgggcatggtgccttgactcagacctcggagcaagtacgaaaaatcacttccgatcggcctcattaataacacagttgctaatgtggcagtaagacagttccctggcccctgattaaaaacagaagtttcccccacattcgtggagatggagcagaagggaaaacaaagacaagcacacttgtgccagataaatacagacgcaaacacatgcatggcagataaacacacactggcacaccaaatatacacacagccggctgcagacatccgggtgggctcgcacagcccgaagagaccaaaagcccgggtgggctcgcacaaaaaggaacagaaaccgctgcagagatgtcccgctggaccctggccacatctgggacctgatcacttcagtgtacttgaacaggagacagagtgtgggaaattgacatccctgggagtagccctgagccagaaatggaatgagttggtggataaataccccagctccctccccagcatatgcctaatccacagtctcccagagacccctggagggatcaggccccagttttccgtagtgacaacctgtttgatatcccttgtcatctctcttctcccctccccaggtttcctgtgttcatttcccaaataaaccacttgccctccaaccctctatcagggtctgtttctgacctgtatgtgtacctcccagaagtatacacagcaatgggtctcaatgagggtaactctgtcacccaggagacatttggcaatgtctgaaggtatttctggctgtaaaattggggcagggggccagacacagtgacttacacttgtaaccccagcactttgggagaccaaagtgggcggatcacttgaggtgaggagttcaagaccagcgtggccaatatggggaaaactccatctctactaaaaatacaaaaattagccaggtgtggtggttagtgcctgtaatcccagctactcgagaggctgaggtgggggaatcacttgaacctgggaggcagaggttgcagtgagccaagatcattccacctcactccagcctgggcgacagagtgagactccatctcaaaaaaaaaaaaaaaaaaaaaaaatgggggcaggggtactcctggcatttagtgggtccagttcagggacgctcaatgtcctacaagggactgggcaaggtggctaaggcctgtgatcccagcacttcgggaagtcaaggcacgaggatcacttgaggccatgagtccaaggccagcctgggcaacatagcaagacctcatctcccctgcaaaaaaaaaaaaatcctacaaggcacagaacagttccccagagcaaaaaatgatgtggccccaaatgtcaagagtgctgacattgagaaaccctggtctacgggaagccactgggccccacgtggaaacagctcagtgcacgcacattattcaaatgcagacacagtgggtgcaccggcagcattagaccacacatacccactgtgcaccaagtccttgaactaaggaaacagcaggatcatccacacctggtgtgttttcctaccaagatgtataaaccagcagaggagacccccaattccacccagatgtggggccctgcccagaccagctttttgtgcaactcacagacaccctggaaagtggttcaatgaccattaaaaccattttagagacgaggcaactgaggcccagacagggtaagtgttttgttgttgtgtttttgtttttgttttttgagatggagtcttgctctgttgcccaggctggagtgcagtggcaccatctcagctcactgcaacctctgcctcctgggttcaaacgattctcatgcctcagtctcccaagtagctacaggcgcgtgccaccacacccagctaatttttgtatttttagtagagacagggtcactccatgttgaccaggctggtctcgaactcctgatcttaagtgatcctcccaccttgtcctcccaaagtgctgggattattggcatgagccactgtgcccagcccagacaggagaagtttatgacccagctagaaacccagagaccccttaggcatgtgtagacatgcttttgaaggcaaagagggtaggatgaaaggagaccctccccaccatcatctcggaattgagataaggagggacaggaagggctttagcttcccagagggaatcctgtatcactttgggtaactagaaaatctattgaaaaatgtttttaggctgggcgaggtagtgctcacctgaaatctcagcactgagggagcctgaagcaggaggatgtcttgagcccaagagttggagaccaacccgggcaacatggcaagacttctcgtctctgcaataaataaaatacaatttttgttgttgttgttgtttgtttgttcttttgagacgaagtttcgctctttttgcccaggctggagtgcaatggcgtgacctcagctcactgcaacctctgcctcccgggttcaaaggagtctcctgcctcagcctcccgagtaaccgggattacaggcgcatgccaccacgcccagctagttttgtatttttagtagagacggggtttcgccatgttggccaggctggtcttgaaatcctgacctccagtaattcacccgcctcagcctcccaaagtgctgggattataggcgtgagccatgacgcccagccaaatacaatgttttttaaacatacattgttttttaaacattggctgactcttggccaagcatcacgcctgtaatcccagcactttaggaagctgaggcgggcagatcacttgaggtcaggagtttcacaccagcctggtcaacgtggtgaaaccctgtctctactaaaaatacaaaaaattagctgggcgtggtggcgcgtgcctgtaatcccagctactcgggagtctgaggcaggagatggcttgaacccaggaggcagaggttgcactgagccaagatcctgccactgcactccagcctgagtgacagagcaaaaccgtgtctcaaacaaacaaacaaacaaaatgggctgactctggactcacacaggcctggtgtctccaatcccagccttgccattttctggctctatgaacctgggtgagccgcatcgcctccctgagcctcagtttccccatctgtaaaacggggattcacccattcaccattccacaaatgtgcacccaagacccactgacaccaagcgctgcgcccagctctaacctatataaagttaaggaagaacacgaacatggtaagtgcgtctccccctcccccaggcatggagctgctgaactagttttgggaatggaatcagagcacgcgtggacagatggagggagccctcagctgcccggactctgcagcccaccacccccactcttctcagatccccctcgtttgaccaaaaagcccctctaccacgaggtaggaccccaagcaggatcccagggactggcgtccaaatccgggccaggaactgaccccagcagccagacccgggacggggctaaagctcgggtttttccacctccgcttcccgccactgcagcgcggggagcgagcgccacctgtgggcctccaaggggaggtgcgtgcgactcccggggaggtggacggtcgcccccgtttctccccaacccgggggacctcgggccctccaggagtttcggaaacagctctcatctcttaaattctcctccacaacccacttttcccggctgccatttcccagctagaactcgtcgtccatgcattcatgcaacatttattgagcacctactgtgtgtattgagcaaacctagatcattgctctaggtttagagtacacagaagacagaatggggctggctcaggcctgtaaccccagccactcaggaggctgaggtgggaggatcacttgagcccagaagatggaggctgctgtgagtcatgatggcaccattgcactccagtctgagaaacacagcgataccctgtctctaaaagtaaaaagaggccaggtacagtggctcggccaggcacggtggctcacgcctgtaattccagcactttgggaggccaaggcgtgcggatcacgaggtcagcagttcgataccagcctgaccgacatggtgaaaccccctctctactaaaaatacaaaaattagccaggcgtggtggcgggcgcctgtaatcccagctactcaggaggctgaggcaggagaattacttgaacccaggagacggaggttgcagtgagcagagatcgtgtcactgcactccagcctgggcgacagagcaagactccatctcaaaaaaaagaaaaaaaatggaaacaaaacagataaacctccatgcccttctggagcttacagtccaagggaagagagaagagaggaggaagaggacaacaggctgcaagatcattgctgatggcagtaagtgcagtaagtgttctgaaggagaaagtatatacagggatgtcactgaagcacctgctgtgggtagagtgggtggagtgggctctgaggaagtgacgcttatcctgaggcctgagaagaataaagccccagccatgccgagtctggagccaggatttccagtagaaggcgcagccagcgcaaaggccctgtggcagaaaggagctcgggtgttgaacagtgggaaaggaggtcacagtagccagagccgagagatgaagaaacaggtgggctgcgatgtcaaggcctattttggagacaaatctgatctctcactccccctgaggagtcacctcctaaaagcccgaggggagaagaaggctcacactgagctaaaagccctccaacaccaccagctgcacccttctcgtcgcccacccacagatatggtgtcgcccacagaaagaagccctggcccatgcactgtccccctacccaccccaccactctcccaggactttgcctctgaccatattgaccccaattatgcagttaaggtgcacgtggtcggctctgcttgcaaagtccccttcttaccccctgcccatctccctgggagacacagggaaccatgcaatgtgccttccaagaccaatgcttggccaggcgcggtggctcatgcctgtaatcccagcactttgggaggccgaggtgggcggattgcctgaggtcaggagtttgagactagcctggccaatatggtgaaaccccgtctctactaaaaatacaaaaattaaccgggcgttgtggcaggcacctgtaattccagctactcgggaggctgaggcaggagaatcacttgaacttggggggcagaggttgcagtgagctgagattgtgccactgcactccagcctgggtgaaagagtgagactccgcctcaaaaaaaaaaaaaaaaagttgccagccccacacacggacctcagcccggcctgccccctttgccttcatactcccgagagcagtctccccatgtggcctgacaaccccaaaagggactatgcagggaggagatctggtttcatgaacattgctcttgggatccctgcctgggggtggccacgagagaggctgtgggtcttgcgcagccacagaaggggagcagagccctgtccccgactccccgccagtgcagaaggggtacaccctctctccacagcctggcctcagttctggggactgcctggctattggggagagggcagagcctcttggagcttgtaattaaggcttcagaggcaccgacttaattactaccttgtgaagggttaattacccctaattgttcaggaatcaggcaatttttgtgccttcagagaatcaaaatattttcccttccagaagtgcctcctcccttttgctttttctaatttccctgcaaggaggggcacgatgggctgggtggggtccggaggatcggaaaccaccagtctcccctcagagaacacacttgccgggcctgccgcaagcaagagcgggattcagaggagagaggttcccagccagctcaaggcaggaagacttcctggaagaggtggccatgggttggtcttaaggaccccaagtcaacctcccaggtaagccaagggctcctagaattctgtgccacctagagggtagcagggcctggggaagctggagctgatggtttcaggcatgggaatgctgcctggagtctcagtttcctcacttgttaaatggggccagggctgcgatgagccaggcagagtgagcagggaataaaggctgccctcggagatgaaatcctggtgggcaccgagaagacatcactcatctgcagctcatctagcttgttgctcctctgcctgggtttgtagtaatgtaagaattagggcccacccacttcccagccctcatctccctgccttcctcctaacccccttgatgggctttgaacacaccgcactggttcccaactcagaacttttgtccctggtgttccccctgcctggcttactttcccccctgatggtgctgtgtctgagaagcttttgtcctgaaatgtcacctcctccagggagccttccctgaccaccctctctcccctgaaccactccttcctgggaattctccagcttatcacacttcttcttttttttttttttttttttcaggtggagtctcgctctgtcgcccaggctggagtgcagtggcgtgatctctgctcactgcaagcccctcctcccaggttcacaccattctcctgcctcagcctcctgagtagctgggactacaggcacccgccaccacacccggctaattttttgtatttttagtagagacggggtttcaccgtattagccaggatggtctccatctcctgacctcgtgatccgcctgcctcggcctcccaaagtgctgggattacaggcgtgagccactgcgcccggccttctatctctcttttgctctctctctctctcttttttttttttttttgagatggagtctcactctgtcacccaggctggagtgcagtggcatgatctgggctcactgcaacctgtgcctcctgggttcaaatgattctcaggcctcagcctcccgagtagctgggattacaggcgcacaccaccacacctggctaattttttaatatttttagtggagatggggtttcaccatgttggccaggctggtctcgaactcttgacctcaagtgatctgcccacctcggcctcccaaagtgctgggattacaggcatgagccgctgtgcccggcccttgctctctgtttttacagagacagggtctcactctgttgcccgggctggagtgcagtggtatgctcatagctcactacagccttgaactcctggcctcaagcgatcctccaaagtagctgggactataagcacgcaccaccacatctagataatttaaaaatagttttttgcagcgatggggtcttgttatgttacccagactggtctcaaacttacggcctcaagagatccttctgcctctgcctcccaaagtgctgggattacaggcatgagccactgcccctggccacacttttacctctcttatgtaaattgccttgtttagatcctggctgggtgactcagggcccagtatcctcatctgtgaaatgggggtgatgacaacagcctcctcagagttccagacctgactgtggtggccgtgggggtccggtgggttgagaccttcttctatggccaaggagtggacttgggggagcagggcaagtgagccaggagcaggggccagagggccggagcagggcaagtgagcaaggctcaagtgatgggtcagtcagaaggggttagaggactgacatggtgtctcacgcctgtaatcccagcactttgggaggctaaggcgggcagatcacttgacatcaggagttcgagaccagcccgggcaacatggtgaaagcccgtatctactaaaaatatgaaaattagaggccgggcgcggtggctcatgcctgtaatcctagcactgcgggaggccgaggtgggtggatcaggaggtcaggagtttgagaccatcccagccaatgtggtgaaactctgtctctactaaaaatacaaaaattagctgggcatggtggcatgcgcctgtagtcccagctactcaggaggctgaggcaggagaatcgcttgaacccgggaggcagaggttgcagtgagcctagattatgccactggactccagcctggactccactggcagcctcacagagggagactccatctcaaaaaaaaaaaaaaaagaaagaaagaaagaaaaaaagaaattagctgggcatggtggcgggcacctatagtcccagctactcaggaggctgagacacaagaatcacatgaacccaggaggtggagattgcagtgagcaaagatcgcaccactgcactccagcctgggtgacagagcgagactctgtttcaaaaaaaaaaaaaaaaaaaaagggcgtggttagagaggaggcagacttgggaacaatgggtatactgttatgacctcattttatagatggggaaagtgaggccccagaaaggtgaagtcacttagcgagggcacgcagccctctagtgggggagccataattcattcccatactgggcagagtcccccacacagagtgggggaggggatggcaggggaaggcggaggagggaatgatgggtggagagctgtttggcagaaaggtgaaatacggttttgattcagctgtgttggaggacatagtgactctgccaagatatagtagagattaaattaggcgcgctggcttacgcctgcaatgtcagcatttttggaggctaaggtgggccgatcacttgaggtcaggagtttgagaccagcctggccaacatggctaaactccgtccctactaaaaatacaaaaattagccaggcatggtggcaggtgcctgtaatcccagctactcgggaggctcaggcaggagaattgcttgaactgggaggcagaggttgcagtgggccaagatcatgccactgcactccagcctggaccagagttggtcctgaaaaaaaaaaaaaaaaaagagagagaaaggaggaaggagggagggagagaagaaagaagagagtgagcaagggagggagggagaggtggttgattggggaagactattctagttgcaagtaaaaaatccaaacccaaactggcttaaagaaaaaataatgataatttattggtttgtgtcattgaaaagtttaagatatgttggcttcagggacagctggattcacgggctcaaacaaagtaatctggctgggtgtggtggctcatgcctgtaatcccagcagtttgggaggccaaggcaggaggcttgcttgagcccaggagtttgagaccagcccgggcaacatagtgaaacctcatctctataaaaaaaaattaaaaaataaggagggaggatcactcgagcctgggaattgaggctgcagtggaaccatgatcgtgccactgcactcacacctgggtgacaaagtgaagccctgcttcaaaagaagaaaataataattcctgggctccctctgattggacagtttggggtcacatgtcatttaggaaccaatcacagtggctagaaaggatagaatgagtccatgagccactcctgttgatgagggtggggatggccctacagacctcagtagacaaagagtgtaggcaaaagtgacaatttattcaagaaacatttatttatttatttattttgatttatttatttttttgagacacagtctcgctctgttgcccaggctggagtgcactagcgcaatctcagctcactgcaacctccgcctcctgggttcacacaattctcctgcctcagcctccctagtagctgggattacaggcacgcgccaccacacccagctaatttttgtatttttagtagagacagggtttcaccgtgttggccaggctggtctcgaactcctgacctcaggtgatgtgcccgtcttggcctcccaaaagtgctgggattacagccctgagccactgcacctggctgagaaacattaattgagcacctgtggtgtccctggccctgttttaggtgctgaggatacagcagtgaacaagacagaaaaacccctgcccccatgggactgacactctatgtaaattcatgaattaaaatattagaaggtgatgtgctatagagaaaaataaaatagaggggaaaggttagaaaggactgggggaaggaagctaaaatttcaaatatgggggtcgtcagggaagtactcactgaggaggtgacctctgagcaagtatgttaggcagacaaaagagtgagaggggccaggcgcagtggctcatgcctgtaatcccagcactttgggaggccaaggcaggcagatcagttgaggtcaggagttcgagaccagcctggccaacatggtgaaaccccgtctctactaaaaatacaaaaattagccgggcgtggtgatgcccacttgtagtcccagcttttcgggaggctgaggcaggagaatggcttgaacccaggaggcagaggctgtggtgagctgaggttgcgccactgcactccagcctgggcaacagagcaagactctgtctcaaaaacacaaaataataaaaaaataaaaaaatatctgggggaaaggtgttccaggcagagggaacagcgcatgcaaaggctgtgaggctggactgggcctggcatatttatttggggaacagtgaggaagctggggtggctggagccaagtgaatgaggggaagagagctggaggtgacagggcaaatcacacagccaagccttgtgggccttggggaagactggattttactgggtgaggtgggagccatagaggcttcttggagagaggaagagcttggtctgaacggattcaggtgctcacaggaagaacagacggccagaccaacataacagctgtcacagatacaggaagagattttatatctccctgcggttggttttgttgccttttcacacgactcatggggcgaggcaccagtggggtgaggagctgggaggacaggccaccccagagttccccttcccaggagtcagggagcccccaccccaccatgtcccaggacacactcgggcagggctgccaggagtgtttgtgtttcaccctctctagatgggtggaaatgaggtgtggctggggaggtggtggggtggccaggagggaagctgggtcccggagaggcaggacccgtgaaggcatcggggaagggggtgccccctctgagaaggcacaggggtcttgctgtctcctttctctatttgagtatcaaaggcctgctcaagcccgaagctaaagggaaggtcaaggatgttgggggtgtcaggctgtgggtggctgggtttggtcacagctgcaattgtactgccgataaggaccctcgaggctgaatgtcagcccggccagggttgggcaacatcctgttggggaagtctcttctagttatggttttcgcttctccagccctgccctgaccctaatgggagaattacaggcaggggagcacacactgaacgcgcacgttaccagaaacagaaataactccctttaaattttcccaagaataggatatacacgtgtaaaaaaataataataataatttaaaacttagacccagctgggcatggtggctcatgcctgtaaacccagcactttgggaggctgaggtgggtggatcacctgaggtcagaagttcgagaccagcctggccaacatggtgaaacaccatctctactaaaaatacaaaaattagccaggcttggtggcacatgcctgtaatcccagctacttgggaggctgaggcaggagaatcacttgaacctgggaggcagaggttgcagtgagccaagactgagccactgcacttcactgtgcgtgatgggagcagagactccatctcaaaaaagaaaaaaaaattagccgggcgtggtggcaggtgcctgtaatcccagctacttgagaggctgagggagaatcacttgaaaccgggaggcagaggttgcagtgagcagaggtcacgtgccattgcactccagcctgggcaacaagagcgagactccgtctcaaaaaaaaaaaaaaaaaaaagaacttagaccctacctcataatcacacacaaaaagtaactaaatgactaaatgagactaggcgcagtagctcatgcctgtaatcccagcactttgggagactcaggtggagggatcatctgaggtcaggagtttgagaccagcctggccaacatggcaaaaccccgtctgtactaaaaatatttaaaaagtagccaggcgtggtggctcatgcctgtgatcccagctactctggaggctgaggcctgagaatcacctgaactggggaggcggaggttgcaatgagccgagattgcaccactgcactccagtctgggcgacagagcaagactccgtctcaggagacaaaaaaagaaaaagaaatctttgagaccatggattaggcaaaggtttcttacctatgtcaccaaaaccacaatccgtaaaagaaaaaaataatgagcgaattgaacttcatcacaatgaaaacttttgctcttcaaaagacataaagaaaataaaaagacaagccgccaactaggaggaaatattttcaaatcatttttctgaaagaatgtgtatccagaatatataaagaactcttaaaataaaaactctttatataagaatatatacggaactcaacaataagaaggaaaaaaaatcccagtttaaaaatgggcaaaagatttgaacagatgcttcgccaaagaggacatttcgatggtaaatatgcatatgaaaagatgcgcaacagcattagttgttacagaaatgcaaattaaaaccacaaggagataccacttcatacatctattagaagagctaagatttattttttatttttgagatggagtctcactctgtcacccaggctggagtgcagtggtgcaatcatagctcactgcagcctcgacttcctgggtcaagcgatcctcccactttagcctcccaagtcaccaggactacaagtggacaccgccacgcctggctaagttgtgttttggggtttcttttttttgagacagggtctatttctgtcgcacaggctggagtgcaatggtgccatcatagctcactgcagccttgaactcctgggctcaagcgatccttccacctcagcctcccaagtagctgggaaccacaggcatgcaccactctgcctgattaattttttgtttgtttgagacattctcgttctgttgcccagctggaattcagtggcacgatctcagctcactgtaacctccgcctcctgggttcaagtgatcctcctgcctcagcctacagagtagctgggattacaggcatgtaccaccacacccagctattttttttttttttttttttgtatttttaatagagactaggttttgccatgttggtcaggctggttgtgaactcctggccttaagtgatgcgcccatctcagcctcccaagatgctgagaatttttttgtattttttatagagacggagttttgccacgttgcctaagctggtctcaaacttctgagctcaagtgatcctcctccctcagccttccaaagtgttgggattacaggcatgagccactgtgcctggcctcaggtgaactctttttttttttttttttttgagacggagttttgctcttgttgcccaggctggagtggagtgcagtggcatgatctctgctcacggcaacctccgcctcccgggttcaagcgattctcctgcctcagcctcctgagtagctgggactacaggcgtgcaccaccacgcctggctaattttgtacttttagtagagacagggtttctccacgttggtcaggctggtcttgaactcccgacctcaggttatccgcccgccttggcctcccagagcattgggattacaggcatgagccaccgcacctggccccaagtaaactctttaaatcatcttttatgcttcagcttcttccttttttttttttttttttttttttttttgagacagagtctcactctgtcgcccaggctggagtgtggagtgcagtggtgcgatctcggctcactgcaacctccgcctcccgggttcacaccattctcctgcctcagcctcctgagtagctgggactacaggcgcccaccaccacgcccagctcattttttgtatttttagtagagacggggtttcacatgttagccaggatggtctcgatctcctgacctcgtgatccgcccgcctcggcctcccaaagtgctgggattacagggttgagccaccgcacccagcccagcctcttttatgttgacaaattcaagtgtccatcaacagatgaatggacaaacaactgtggtcctcccatgcaaggaaacactggttagcaatagaaagcaacaaactgttgataaacacagcaacatggataaacctcaaaaatatgccgagtggaagaagccagacccacaatattacatattgtacaattccatttatatgaaatttctagaaaaggcagagctctagagacagaaagcagattagtgattacctggagctgaggctgggagtgcggatggattgctaatgtggggatttggggggaaatcaaagtgttctcaaatgctgtattgtagtaatacttgcacagctaggtgagtttactaaaagtcatctaactgtaggtttgtaatgggcgaattataggctatataagttattcctcaataaggctataaaaatgttgccctaggccaggcgtggtggctcatgcctgtaatcccagcactttgggaggccgaggtgggcggatcacaaggtcaggagatcaagaccatcctggctaacacggcgaaaccccgtctctactaaaaatacaaaaaattagctgggcgtggtggcggtcgtctgtagtcccaggtacttgggaggctgaggcaggagaatgacaggaaccctggaggcagagcttgcagtgagctgagatcacgccactgcactccagcctgggtgacagagcaagaccccatctcaaaaaaaaaaaaaaatgttgccctaaaaattcggctatgggcttgtcaccatccgatctattgactcaacaagtccctacagtccccaacccttttctgagctctggaggcacagcaggaaataaaatagacaaatatcctggggctgacattctcagggggagacagagagggagcaagatcaagaactaaaatctagcagggtgggccgggcgcggtgctcacacctgtaatcccagcactttgggaggctgaggcaggcagatcacttgagctcagttcataaccagcctggccaacatggggaaaccccatctctactaaaaaaaaaacaaaaattagctgagcgtggtggcgcatgcctgtaatcccagctactcgggaggctgaggcaggagaattgcttgaacccgggaggcagaggttgcagtgagccaagattgtgccactgcacttgtctgggtgatagagtgagactccatctcaaaataaaaaaaaaaaaaaaaagaaagaaaaaaagtccagcagggtggtcaggcacggtgactcaggcctataatctcagcactttgggaagctgaggcaggaagatcgcttgagaccaggagtttgtgaccagtctgggcaacatagcaagacccctatctctacaaaaaataaaataaacaaaattagtcaagtgtggtggtgcacacttgtagtcccagctactcaggaggctgaggcagaaggatcacttgaacccaggaggttgaggctgcagtgagctgagattgcaccactgcactccagcctgggtaacagagtgaaaccctgtctcaaaatgttcagcactgtcctggtctgtagatagaaaccaaaacaaacaaataaatttatgtattcatttaattaaataaaccaaattagcctggcatggtagtgcagacctgtagtcccagctactcaggagggtgaggcaggaggattgcttgagcccaggagctggaggctgcagtgagctatgatcgcaccactgcaccccagcctgagcgacagagcaagaccctgtttcaaaataaaaagaaaaaagagaaataaagaactaatatatacatctctttaaaagcaaacgaacaaaagacttgggccaagcatggtggctcacacctgtaatcccaggactttgggaggccaaggcgtgcagatcatctgaggtcaggagtttgagaccagcctggccaacgtggtgaaaccttgtctccactaaaaatacaaaaattacaaccgggcgcggtggctcacgcctgtaatcccagcactttgggaggccgaggcaggcggatcacgaggtcaggagatcgagaccatcctggctaacacgatgaaaccctgtctctactaaaaatacaaaaaatgagctgggcgtggtggcgggtgcctgtagtcccagctactagggaggctgaggcaggagagtggcgtgaacctgggaggcgaagcttgcagtgagccgagatcgcaccactgcactctggcctgggcaacagagcaagactctgtctcaaaaaaaaaaaaaaatacaaaaattacctgagtgtggtggtgcgtgcctgtaatcccagctactcaggaggctgaggcaggagaatcacttgaacccgagaggcggaggctgcagccagctgagattgtgccactgcactccagcctgggtgacagaatgagactctgtctcaaaaaaaaaaaaaaaaagacctgaagggggcgagagaaagccatgtggggatctggaggaggaggtggtgctgcaagtgagagtgagctgccgtgcaaagcccctaaggtaggagcatgcccaaaacggcgaggaagctggcctggctgaagggaatgagcaaaggggagagaaggaggaggtgagggcagataagtgctgagcagatcctgcagggccctgtgggccacaagaaggaatttggcttttgcactgagtgaggtgggagccctggagggtccttgagcagaggagggacgtgccctgacagaaaagcatggagcgggcgagcaagggcaggagccaggagaccagggcagaggagtctgcactgggccaagggggagttgatggggccggaccaggtaggggctgtggaggaggtgaaaagtgagtagatgctggatagattttgaaaatagagctctcgggatttgctgatacaatagagagagagagaaagggacaggggcagagatagaggccaggcatggtggctcatgcctgtaatcccagtactttgtggggcagaggcaggagggtcactgaagcctaggagttcaagaccagcctgggcaacaaagtgagaccggggaaggagaaggaaggaaggaaggaagggagggagggagggagggagggagggagggagggagggaggggaggaaggagaaagaaagggaggagagatagagatagaggaaagaaagaaagaaggaaggagaagaaagagggaaggaaggaaggaaggaaggaagaaatggagggagggagggaaggaaggaaggagaaagaaagggaggagagacagagatagatgaaagaaagaaggaaggagaagaaagaaagagagggaaggaaggaaggaaggaaggaaggagagacagagaacgaagaaagagaagaaagaaggaaacagaaagagagaacaaaataaaacagagacagagacatggaggactccaagtattttgccccaagaatctgggccaaaagaaaggaaacaaggtggccgggcgcggtggctcccgcctgtaatcccagcactttgggaggccgaggcgggcggatcacgaggtcaggagattgagaccatcctggctaacacggtgaaaccccgtctctactaaaaatacaaaaaattagccgggcgtggtggggggcgcctgtagccccagctactcgggaggctgaggcaggagaatggcgtgaacctgggaggcagagcttgcagtgagccgagatcgcgccactgcactccagcctgggtgacagagcaagactccgtctcaaaaaaaaaagaaaaaagaaaaaaaaggaaggaacaaggctcagagaggtccaaggagttgccctggcggtccggggccacagtggccttcatccccagctgagatgtgtccccagtctaaggccactcagagccaggcaccttctccggctgcctcccaatccccgccccccgcttccgtcccagcaccctcaccccgcccccgggcccctttgtcctcctcttcgtcttatttccagaatttctcctccctagggaatccagtccatgtgcttttgattcctttgtcctgaactcatgcggcatgagcacccctgaagccttatgtggaaaaatttggaggctgggggtggggagggggtcacattcctcccgggggtacagagctacgtcggcatctccagggccccccagcagcaagcaggcatcctcccaggccaggccagaccggacgctgcccaacacaggctttctttggggcttggccggcgcccgactacagccccggctccagctgccctgcctgtcccccgcccccacgcctcccgtcccaacctcccacacgtttcctcctagaagcccagacccgtgggacttggcctcccccgcgccttccctctctactcagctctgcagctcctgtaggcctcctccccgggtgatcacagaaggaccagctcaccttagcgggacaggcagggcatgggcgtggccagagcctcgggcaggcatcccaggctccctggtgtctctctcatccgctggcctctgtgccctcttctcttccccacccccgctcgtggcccctcctgcctctccatcgcaaagtccccagaggagtctccttaatcacttgcttttgactgaatcctgaccacctggaccctgatctagctactgaggagataaagtaaccaacacttaaaagctaaccttcaggcattctgggaggctgagactgacggatcacttgaggtcaggagttcaagaccagcctggccaacaagatgaaacctcgtctctactaaaaatacaaaaaaattagctggcgtagtggcggatgcctgtaatcccagctactgcggaggctgaggcaggagaatcgcttgaacttgggaggtggagattgcagtgagctgagatcgtgccactgcactccagcctgggcaacaaagcaagactccgtctcaaaaaataaaaattagctgggtgtggggccgggcttggtggctcaagcctgtaatcccagcactttgggaggccgaggcaggcggatcacctgaggtcagaagttcaagaccagcctggccaacatggtgaaaccccgtctctactaaaaatacaaaaaaaaattagccaggcgtggtggcgcatgcctgtaattccagctactcgggaggctgaggcaggagaatcagttgaacctgggaggcagacgttgcagtgagccgagatcatgccactgcactccagcctgggtgacagagcgacaccctgtcttaaaagaaaaaaaatagctggctgtggtggcatgtgactgtagtcccagccacaagggaggctgaggtgggaggattgcttgagcccgggagttcaaggctgcagtaagctatgactgcactgctgcactccaccctggctgagaccttgactcagcaacaatgaaaaagtgacagggccaggacttgacccctgaccattttgttctacagcctttcatgggaaagacagatgagttttcgaccttccagagcctttgatccagaggagagaggcaggaaatagcaaatggataagaatatgccattcggtgactagggcaatggagattgcaaaagatggtggctgggaaatggggcttgtgtcgggggtccctgagaccaccctcagggtcaataatttgctgagattgatagatcccagaaaagtggtgttactcccagttatggtttattacagtgaaagttacagatgaaaatcagcaaagaggccaggcttggtggctcatgcctgtaaccccagcactttgggaggcccagacaggcagatcatttgaggtcatgagttcaagaccagcctgaccaacatggtgaaaccccatctctactaaaaatacaaaaattagccaggtgtggcagggggctcctgtaatcccagctacttgggaggctgagacaggaggatcacctggacctgggaggcagaggttgtagcgagccgagatcctgccattgcactccagtctaagcaacaagagcaaaactccatctcgaaaaaaaaaaaaaaactaggaatactagaggagaggaggtgaggcagacaggctccaagactcctccatgattcccacctcctgatgtctgcactctgtgtgatccctcgagtgtgagctggacccaataacttgcttctaacaatagactaggacaatgtatgccaggagcagtggctcacgcccataatctcagcactttgggaggctgagacagagggatcacttgagcccaggagttcaagaccagtctgggcaacatagcaagaccccatctctataaaaattcaagcattagctgggtgtggtggtgcacacctgtagtcccagctactcgggaggctgaggtgggaggattgcttgtgctcaggaggtcaatgctgcagtgagctatgattgtgccactgcactccagcctgggtgacagagtgagaccttgtctctctcatatatgtgtatatatatatacatatattttttttttgagatggagtctcattctgttgcccaggctggagtgcagtgcagtggtatgatctctactcactccaacctccgcctcctgggttcaagcgattctcgtgcgtcagccttccaagtagctggaattacaggtgtgcagtatcacgacctgctaattttttgtacttttagcagagatggggtttcaccatgttggccaggctggtctcgaactcctggtctcaagcaatccacctgcatcggcttcccaaagtgttgggattacaggtgtgagccaccgcgcctgacctatgtgtatatatatacatatctatagatagatagatagatagatagatagatagatagatagatagatttaatgttaccattttattcatcatggttttgcattaatcttgacttttacaaaatatcacaataaaataatatttatgagttcaggacaaagttcttgagttctttgacaccccctgaaattttgttcccaagtcaagcatccaccttgcctctcattccagccctacagcttaatgatatgagaccatcgtcatgcacaagacaggactggatgagtgacatctacagattctgctgccacactggactcaaggcaggttcagttctgctgcagtaacaagccagggaaaaaaatgagccaggcatggtggcacacacctgtagtcccagctactttaagccccaaatctcaggagcttaaaacatcagaggtttcacttttcactcagccagcatctggcatgttgcccgttgccaaggcagaagaaaaagaacatatagcatgctctgcagcagctcttaaagcctctgcccagaagtgacacaagtcaaacctgctcacatgccattggtcagagcaagtcacgtggccacacaagtgggtggagcaatgccttcctaccttgtacctggagggagaaagagctggaatattggtgaatcgctcagtgatcatagcagtgtccctgggtgaggtccagagggcagctgtatgtctggaggtagacagggaggtccaggtggagacatgtaagaggctttgggatataattggtattgacttcttggagggcctgatcaccccctactatggaggacacatgggggtcacctgccaggacccacaggatgggaatcctgccccagtctcctctgagactggatttttttttttttttgattttttttttgagacaggatctcgccgaagtacagtggtgcaaccatatagttcgctgcagcctcaacctcttgggctcaagcaatcctcctgcctcagcctcccgagtagctgggaccagagtcatgtgccatcaggcctgggtaatttttaaactttttttgtagagatgggggtgcgggtctcgctatgttgccctagctggtcttgaactcctggccttaagcgatcctcctgcctcgtcctgccaaagcgagccaccgtgcctgtccttcagcctggataaaatttgtggtgaaatacacatgacatgaaatgttctatcttaaccattttaagtgtacagttcagttacattaagaaaattgtcaggccgggcgtgggggctcatgcctgtaatcccagcactttgggaggctgagatggacagatcacttgaagtcagaagttcaagaccagcctgaccaatatggtgaaaccccgtctgtcctaaaaatacaaaaattggccaggcacggtggtgtgaacctgtagtcccagctactgggaggctgagacaagagaatcacttgaacccaggagacagaggttgcagagagccaagattgagccactgtactccggcctgggcaacagagtgagactcagtctcaaaaagaaaagaaaattctcagttgggcacagtggctcacacgtgtaatcccagcactttgggaggctgaggtgggcagatcatctgagatcaggagtttgagaccagcctggccaacatggtgacaccctggctgtactaaaaatacaaaaattagccaggaatggttgtgcacacctgtaatcccagctacttgggaggctgaggcacgagaatcacttgaacccaggaggcagaggttgcagtgagcccagattgtgccactgcactgcggcctgggcaacagagtaagaccccgtctcaaaacaaaacaaaacaaaaaccagaaaaaataaattctcatagttgccactgacaccatcattcatctccagaactttttcatcttgcaaaactaaaactgtatccacaaaacaactccccgttcctcctccctccagttcctggaaaccacaattctactttctgtttctatgaatttgacaagtttagttacttcctgtaaatgtgatcatacggtatttgttcttttgtggcaggtttatttcacttagcataatgccctcagggtgcattcatgttatatgtacgagaatttccttcctctttaaggctgagtaatattccactgtatagatagaccacattttgtttatccattcatctatccatggagactggttgctttcaacttttggctattttagctaatgctgccgtgaacataggtgtacagatgtctctttgaactttgctttcaattcgggtgtctatgcagaagtagaattgatggatcatatgacaattctatgtttaattttttttttttttttgagatggagtcttgctctgtcacccaggctggagtgcagtggcgcgatctccgctcactgcaacctccacctcccgggttcaagcgattctcctgcctcagcctctcgagtagctgggattagaggcagctgccaccacacccggctaatctttgtattgttgtccaggctggtctcaaactcctgacctcaaatggtccacccacctcggcctctcaaagtgctgggattacaggcatgagccaccatgcctggcctctatgtttaatttttttaggactctccatactgttttccacagtggctgcaccattttacattgtcaccagcagcccacaatggtttcaatttatggggttttgttttgttttgcttttttttttttttttttttggacagggtctcactctgttgcccaggctggagtgcaatggtgcaatcatagctcactgcagccttgacctcctgggatcaagcgatcctcttgcctcggcctcccaagtagttgggactacaggtgcatgccaccatgctcagctaatttttaaatatttttagaaatgaagtcttcctttgttgcccaggctggtcttgaactcctggcccaactgatcctctctccttggcctcccaaagcattgggataacagttgtgagctaccacttctaacctattttctgtttttttgatagtagccatcctaatgggtgttaggtagtatctcactgtggtttttatttgtttattcatttatttatagagatggagtcttgctatgttgcccaggctggtctcaaactcctggcctcaagtgatcctcccacctcggcctcccaaagtgctggaattacaggcgtgagccaccgcacctggcctgtggttttgatttgcatttccctaatgattggtgactttgagtatcttttcataggcctattggacatttgtctggcctggaattttaacaactctgtttcaaaggaagcacagagtgtgggtgtcaatctccttgccaatgtcagggccgcctgacctcgtggatagcaggcagcccagagctggctcctcgggccggacagaagctgggcatgagaggctgtcgtgggagtgacaattccactaggggaatgccagattgccactgaactttgtcactaagacccacaccaaaggccccagaaagccccagtgacacttttgcccctagataggagggtaccgacaggaaatgctgtcagaaaaatgcctccttgtacactcaaaaatggcttttgccgtctgcccagaggggcccctctccccctgactcaccgtagcagcgcgtggaggacaattttggctgtgacaacgtcacgcccgctgcggggagttgatctgcaagccacaaacgtcattcattcctctccacctccaggatttggaacatctccccggaccacagatttttccttcaatcaacttgcttttcctttaaaaaaaaaaaaaaaacttaaatgaatttatttgggaaggaacttttatgccaccaccacaaaaggaaacaaaaggaaaccagggccatttccataagtagaaagcaacagcaaaaggacctatatttgtaggggtgggggtgaaattaaacttgcttcctgctgtcgcctggttgaagcctcaagagccgggactagggtagggagagggaggtgcccaggcgtagaatataatgagtcgctcactcgcaggaccctgggatccacagcctcaccctccagtgaagctctggatcaaagagactgctctttttgtttaaaaaaaaaaattgaaaggagacaaaaagggaaagaaataggccaggcgcagtggctcacgcctgtaatcccaacagtttgggaggcagaggcgggaggatcgctagagctcaggagtccaagaccagcctgggcaacataatgagacccctgtctcattataaaaaagtaaagaaaaaaaatggggaaggaaattaaaaaccgaaagcgacgactgaagtgtttagaggtgtcagagatatagctgtgaaaaactcagacttctttttttttttttttttttttttgagacagagtttcgctctgtcgcccaagctggagagcagtggcgtcatctcggctcactgcaacctctctgcctcccaggttcaagcaattctcctgcctcagcctcctgagtagctgggattacaggcatgcgccaccatgcccggctaatttttgcacttttagtagaggcaggatttcaccatgttggccagactggtctcaaacgcctgacctcaagtaatccacctacctcagccttccaaagtgctaggattacaagcataagccaccatgcctggtctattttatttatgtatttattttattttatttttttgagacagagtctcactctgtcaccctggctgcagtgcagtggtgcgatttcggctcactgccacctctgcctcctaggctcaagtgatcctcccacctctgcctcccaagttgctgagactacaggtgcacactaccatgcccagctaatttgtggagtttttgtagagatgaggtctcgatatgtagcccaggctgctcttgaactgctggactcaagcaatcttcctgcctcggtctcccaaagtgctgggaatacaggcatgagccactgcacccggcctgttttttttttttgtttttgttttttttttttatggaggtgagattgacatgacataaaatagacccttttaaagtgcatggttcagcgccatttagtacattcactacgttgagcaaccatcacctctatctagttccagaatgttttcaacaccgcaaaaggaaaccccgtcctcattaccactcattcctcattcctcctccccagcccctggcaaccaccaatctgttttctggctatgaatttgcctattctggacatttcatataaatggaatcgtgcactatgtgaccttctgtgtctggcttctctcactcagtatcatgttttcaaggttcatccaccctgtagcatggatcagagcctcgttcctttttatggttgaattaaaaatcgctttttatggtaattgtgaaccgtgctgctatgaacatgggtgtataagtatctgtttgaggtcaggcacagtggctcatgcctggaatcccagcgctttgggaggctgaggtgggcagatcatttgaggtcaggagtttgagaccagcctgaccaacacggtgcaaccctctctctactaaaatacaaaaattagccgggcatggtggtgggtgcctgtaatctcagctactcgggaggctgaggcaggagaatcacttgaacccaggaggtggaggttgcaatgagctgagatcgcgccactgcactccagcctggacaagagtgagactccatctcaaaaaataaaataaacataagtatccatttgagtgtctgccttcagttttctcaggtgtatactcaggagcagaatggctggatcacagggtcactctacacgtaactttttgaggagccgcaaactgttttctatgcctggaaagaagtgaaagggagacctccatccaagggacagagccctggggatgggttgattctcaccaatgctttcccatcgcttctttctgggactggctgggaccgtcagtgccatctgtggccctatttctcgggaacccacaagcccacaacagaagaggcccagaggcatgcggaggggttgacccgggtgggcacccagcctgaataagcccccttcctcccctggccttccccacccatcgaaagtcaagggaaggattctgagacccccgtcctcacagtgccccccagaagcctgaccccatccttatcgggacatcagcaccaccccgctcagaagactttgcaaaatggggaagacactgagagctgcaagaaagtgacaaaaatgccaccaagtgtcacacagcgttcccagctcagggcttcttgttggctgccaccagttccccacccccacagccacccctgagctgttcccctcccccaccctactctcctttgcttcctctaaacgcttctccttaaaacctttaaacattttaaaattcttttttaaatatttgtatagagcctcaggtttatagaataaatgaaacaatgcaattcttgggaccatcggtctatccatgatcagctttattttacttacttatttactgagacagagtctcactctgtggcccaggctggagtgcagtggtgagatcatagctcactgcaacctcaaactcccaggctcaagagattctcccacctcagccccctgagcagctgggattacaggcacgtgccaccactcctggctaatttttgcattttttgtagagactgggttttaccatgttgcccaggctggtctagaattcctgggctcaagggatcctcccgcctcagcctcccaaagcgctgagatcacaggcatgagccactctccctggcgcattttatcttccttgatacaaactcttttcagaattctctgtttttgctttggtctctgataaaatcacgtctgaatataaccgcaaaacaccacatgcctgcgttacatggcgttatgttaaacagccatcattttggctgggtgcagtgatccatgcccatctctactaaaaatacaaaaaaattagccgggcgtggtggtgcgcgcctgtaatcccagccacttgggaggctgaggcaggagaatggcttgaaccggggggcggaggttgcagtgagccgagattgtgccactgcactccacactccagtctgtcgacagagcaagagactctgtctcaaaaacacacacacacacacacacaaaacagccatcattttaggaaacgtttatacctggaaacttctgtgtgtattattcacaatttgcgggaataaagaattttactttgcaagaaaatatgtaaattaaaaaataaaagggaaggaaggcatacccatgagcctccctcttcaccaagaactgagatatgaccttgttcccatgctcccatgtttatcttgctgattaccaccactccgaatattctttgccccttattcctttgctcagttacttaattttttttttttttttgagacagagtcttgctctgtcacccaggctggagtgcagtggcgtgatcacagctcactgctgcctcgaattcctggcctcaagccatcctcccacttcagcctcctgagtagctgggactacaggtgcgagtcaccacacctggcaaattttttatttgtatttttggagagatgggggtctcactatgttgcccaggatggtctcgaactcctgggctcaagcgatcctcccaccttggcctccccaagtagctgggattataggcatgagccactgcgcctggcccagccttgtttatttttatttatttatttattttattattattgtttttttttgacacggagtcttgctctgtcacccaggctggagtgcggtggcgctatctcagctcactgcaacctccgcctcctgggttcaagtgattttctgacctcaggctcctgagtagctgggattacaggtgcctgccaccacacctggctaactttcatacttttagtagagatggggtttcaccgtgttggccaggctggtcttgaactcttgacctcaggtgatccgcccgcctcagtctcccaaagtgctgggaggttacaggggtgagccactgagcccggccgccttgtttatttttcaaagtcttcttgcatatgtttgtatcctgaaaccaaatctcgttttatgatctttgtgtctgagctttttcgcaaggtggctttttcctatggggctttggagactttttcaagattctactgtggaatctgtcacgctgcaatttaagatttttttctcctgacttcactaagtttttaaattgaagaaagaggtgtggctaggcatggtggcatgcacctgtaaccccagcattttgggaggctgaggtgggcggatcacttgagggtcaggagatcgagaccagcctagccaacatggtgaaactccatctctactaaaaatacaaaaattagccaggcgtggtggcgtgtgcctgtaatcccagcttctagggaggttgaggcaggagaattgcttgaactcaggaggcggaggttgcagtgagccgagatctcgccactgcactctagttcgggcaacagagcaagactctgtcccctgccccccctcaaaaaattgcacacccctggagttattttttcacagctgtataatattccaagtgctttataaagttaccgctgaggaagtgctagggttttattaatgacttaatgaccatcatgttcatagattgctttgaaggattaatgatgcccttttaagcatttcacccttttcttcctccttactgccccaaatcttggtgatctctgggaggggccaagactggggacacttttgggcccagctgcccatgaggaccccacttctgcttcggccacttctgctcagctatcctcgaggttgcttatataccatctatttataaccccgcccccccaccccacgtcacccgccccctgccagggcaaccagtgaactcagtgtccatggggaaggggaagtgggttactaggtgctagagtttgtttggggtttgggggtgcctctgctgcttcctgaagggcttcatttcctagaagctgagaacactgagctgacagatcaaccccccttccttcccacagtgggtcatggggccaaggaggaagaagaggaaccaggtgctggcaccccaggtcgcaaacacatgcactccccctcagccccggagcacggggcctcgttgccttgtccctctgagccatcgcggcctctcgcttctgccctctttatgtttgggctcctcctggacttcccttcagcaccagagacccctgcagcccagaccccaggagactaagaggcctgggtggtctctgggatgggcggggaggcacacatgtgcaggactggctcttccccactctgctccagggccgaggccccaaatagctggacttctatatttagaagctggctcagcagcaccagggaactataaatacagcccagatcagtgcagcctccaaaatccccaggccaggctgggatgagtagggagcaaggagttagggagatgtcagtggggccagatggggtctgcagtgagggccccctgggccaggtgcacactgacaggccaggctcccggaaacccaggtgttcagcctgctggaggagacaaacagaccatagtgggacctgcccccggtgggggatcagggttggccagcgggcttcccaccctctttcccgttctctggggcttcctggcacagggacagctgtctggtctcacaatagctgcgccgccctcctggagccagctgcggggctcatccgtgtgggggctgcccggccccttcctctgccattgtctcccagccagggggcatcctgttatgcccccctccacccggagaccccatctgaccccccgcctcagcccaggcttgtgcgggtgctgggcaagggctggcggcataagaagccggggagtggggcgttggggtctcctggtgtccctccctgttgcagagggcagcaaagagacagttcaccccgctctgggatcatcctaaccgcggctcctgttgtttattgagcgtccatgcccacctacacttctgcaatgcgttccctccagtctggtcctcacgggcacctggagaagttctgaccatttcacagatcgggaaactgaggcccggaaaggccacatcacctgcctgagaccacacagcccaaaagggagctctgggcgtggtggcttatgcctgtaatcccagtacttttggaggctgaggagggtggatcacctgaggtcaggagttcgagaccagcctggccaacatggggaaaccccgtctctatcaaaaatacaaaaaaattagcctggtgcggtggcaggcgcctgtaatcccagcttactcaggaggctgaggcaggagaatcgcttgaacccgggaggcggaggttgcagtgaaccaagatcgcgccactgcactccagcctgggcaacaagagcgaaactccatctaaaaaaaaaaaaaaaaaagtaaaaaaagttagccaggcatggcggcacgtgcctgtattcccagctacttgggaggctgaggcgggagggtggcatgagtccaggaggtgcagtctgcctcaagccataattgtgccactgagttccagcctgggcaacagagaccctgtctctaaaataataataataaattaggctgggcgtggtggctcacgcctgtaatcccaacagtttgggaggccgaggcagtcggatcacctgaggtcgggagttcgagaccagtctgactaacatggagaaatcccatctctactaaaaatacaaaaaaaaaaaaaaaaaaaagaattagccgggtgcggtgtcagatgcctgtaatcccagcttactcgggaggctgaggcaggagaatcacttgaacccaggaggtggagggtgcagtgagtcgagatcgcaccattggactccagcctgggcaataagagtgaaactccgtctcaaaaaaaattatactaatatattataattatattataataattattatattatataatataattattattattatattatataatataattattataattatattataataattattatattatataatataattattactatattatataatatattataatgttacatattatatattataattattatacgattataataattattagattatataattatacgattataattcttagattatataattattattatatgactataattcttagattatataataattatattatataataattattatactataattatattatataataattattatacataataattctattatataattattatcatactataataattatataatataattattttatactataataattatattatataattattattatactataataattatattatataattattattatactataataattattattgttggttggataatcttgggttgcttctttttttttttttcttttttttgagatggagtcttgctctgttgcccgggctggagtgcagtggcgcgacctcacgatctcacgatctcagctcacagcaatctacgtctcctgggctcaagcaattctcctgcctcagctgcccaagcagctgggattacaggcaatcttgggttacttctgagctgagcaacctggggccagtggctcaaaacgcccaggtgccagtttcccttttgacaaatgaggaccatgttcccgcccctcatcattgcagaacaaaagtcatgaggttgtccagaagctgcaaaataggtcagcaggactgagacttcaggacaaagagaaagtggagaaacataggcagacgccccggcagggaccagatcagcgaggctgaaggaggcttcctttagctgggcggcagcggagtggagtggcaggagtactactaatttgcatggtttaccatatagggccccactcagcacaggctctgtgctggtgctctgcagagaaaaagacaaaagtcactcagggggctgacagcctaatgcggctcgagggcagattgttgcaagggaagaagggagatggtgagaagtattggagagactcaagaaagccgccaggaatggtgactcacgcctgtaatcccaacgctttgggaggctgaggcgcgtggatcatttgaggtcaggagttcgagaccagcctggccaacatgatgaaacttcatctctactaaaaatacaaaaaactatccaggtatggtggtgcatgcctgtaaccccagctgcttgggaggctgaggcaggagaatcgcttgaatctggaaggcggaggctgcagtgagccgagatcgtgccactgcactccagcctgggctacggagagactctgtctcaaaaaataataataatgaaaataaataaataaaaattaaaaaatgaggacctggttgtgctcacctggaatcccagctactcgggaggctgaggtgggaggatcgctggagcccagcagtttgaggctggaatgagctatgatcgtgccattgcactccagcctgggcaacagcagactctatctctaacataaagtaaaataaaataaaataaaataaaaaagtgtcgatgatcactatgaaggggtgtagggacaatccctggcatcaggaagcgcctcctgcctccctgagattctgcagacaccagctgtctgacgtgcccatctgatctgcagagaagggacgttgagccctggggttctagctggagtttctgactttctgagaaaaaaagggcaaaatccctccagagctggtctggccctctctccttccagcttctgctggtgttcattcccctcccccacagcccaggccacccccacaggagcccaggacaggaaggggtaaattctaggactggggatgtttgattattcccaggacaatagttctgtgacttcagtgattagtgactttttttccccatcgctgcaatctccccctttgaacaattgaactatattttgcttagcattcatcacttctgcatcttgaatttattcatgtaacaaggagacttgatttcggcatcctcactgaaaaaccctcctcattgccccaaatagtagggaaacctaaaaataaatgtgaatataaggaactcaaaaccaagtccttgaattctggctggacacagacgcctgctaagcctcagggtcacggaggcgctaaagacatgttagtgcccagtagagactttcccctgggctcattgtagggactctggggctgggctgcccgcctatggatcttctcagctgggtaggtcacttgtgcctcagtttcctcctctgtcaaatgggaatgacaacatcattgcagatgttttgaggagtaaatgagttaaaatagattaaaaaaaaaacaaacttatgaccaggcctggtgcagactaagtgctctataaataatagcattttcttggcagcatagcgagagcttgtcttaaaaaaaaaaaaaaaaaaacttaagaaaaaactagccaggcgtgatggtgcacagctgcagtcccagctcctcaggaggctgaggcaggaggatcctttgagccctggagtttgaggctgcagtgagctgtgatggtgccactgcactccagcctgggtgacagagtaagatctcttaaaaatatatatagcgtttgtttgtttgtttttagacagtttcactcttgttgcccaggcttgagtgcaagggcacaatctcagctcaccacaacctccgcctcctgggttctatcagtcctcctgcctcagcctcccaagtagctgggattacaggcatgtgccgccacacccggctaattttgtatttttagtagagacagggtttctccatgttggtcaggctgagtctcgaactcccgacctcaggtgatccacccacctcagactcccaaagtgctgggattacaggtgtgagccaccgcacccagccaaaaaatagcgttttaaaaaattatgaggtagctcaagagacaagctaatcatgtgatttatccagaaaggaaagaaccctcctatcacatgattctctgttgattaacgaagaggcctctgaaatataagtttcccacagggggaaactggcttagaaagatcagaaagatccaggaggtctgctctgtgcggtgaagcttctcttcttggcacctgcctggcatcggaagagggccccttctccctccctgggcttttatgtggacactgtaatgcctcagttttctttctttctttttgtttttgacacaggatctcactctatcacccaagctggagtgcagtggcaccatcatagctcactgcagcctcaaactccccagctcgggtgattctccccgcctcagcctcctgagtagtagtagctgggactacagatgtctgccaccagcctggattatttatttatttattttgtagaaacaagagtttcgccatgttgcccaggctggtgtcaaactcctgagctcaagcgatcctcctgcctcggcctcccagagtgctgagatcacaggtgcgagcctctgcacccgacctgtttcctcatctggaaaatggcagggaaacgttctgccagctgggacgcaggctctgccaactctggcatgccaaagctctgggcacagggcgagtcccaccagcgtgggcgtccagagctatttctgacaagacccctttgcgcctgcccagggaagagccaagtggccccaggcaagaccgccccgcccggctgccacaccttcccctcagagcagccagccccaacacagaggccaaagggttcgtcagagccacatggtggaaactctagcagagggtttttgaaagcaggttgcacttcattcttactgagtgcacgtgtgtgtgtgtgtgtgtgtgtgtgtgtgtgtgtgtgtgtatgcagcgcccctgggtctgtgtttttattgcactttcctgctggcttccagctgcaccgccagttccggggagggccctgggccagcggctgtccgccccccctccttcataaagtcctggcctcgggacagcctgcacagctgcctagcctgtggagacgggacagccctgtcccactcactctttcccctgccgctcctgccggcagctccaaccatgggaggccgcgtctttctcggtaagtactttggggccccgctgggaggggcgaggaagctccagcgggaccccttggctgcgtctgagaaacgggaggcgccgctggtgtctgtggggcctgcgatagaggaagccacatggtcaagcaggcactcacgggcacacggcgagaggggctggtggtgcttgggcacccccacaccccggcaggaactccagggtgctcttggagcctgctaccctgcctggagggatcctcaagctttctactggagccagtctggcatctgctccctaagaggggaaactgaggcacgggggaaggaaaggggcaaaaagtgagtgctgggaccctgagagccgctgtgcttaatataacgcatagaaggacatgggcgggggtggggaagctagaagccaggacttctccactgcaaggtacccccaatttgtccctcgcagtctcagcagcaggggcagcccccagagaccccagttcttgctccccgcagacctggctggggctcagctgcggatcgaagggactttgcctggttctgggtttgaatttgatttttgttgtgacttcctgggactccctttcccgccccacccaaggtgactgtaacggttatcagggtagctcgttgcctaagcaacggggcaacaaagagagtgaagaaatgacatttggggcaaaaaccagaacttcctggaccacagggacacagcttccctgggccagccccaagtggcaggtgtcagctcagcaccccgccttggcttgagagtgagagacaagagcccaccttgggtttcttgggggcacacttgttgggggcagttgccaagacctggcttcccaagggttccacgccctggctgtctgtgtcaccagggccaagtcagagagcctctgcgcctcacttttctcatctataaaatggagcacaacccgtctccgtcttagattgttttaagggatgagtgagttaggacacaaactattcctggttcacagtaagaattaggtaaacagcattttaaaagtgttggctgggcacagtggctcacacctgcaatcccagcactttgagaggccgaggcaggtggatctcttgagcccagggactggagactagcctgggcaacacatcgagacgttgtctctaccaaaaacaaatttttttttttttttttgagacaaagtctcgctcttgtcgctcaggctggagtgcaatggtgcaatctcggctcactgcaacctccgcctcctgggttcaagcgattctcctgcctcgcccccatccaccccgagtagctgggattataggtgcctgccaccatgcccggctagttttttgttttagtttttgtgtttgtatttttagtagagacggggtttcaccatgatggccaggctggtctcaaactcctgacctcaggtgattcacccgcctccgcctcccaaagtgctgggattacaggcatgagccaccgcgcccagccaaaaaaaattttttttaattagtcgggcttggtggtgtgcgcctgtagtcctagtggctcaggaggctgaggtgggaggatcccttgagcccaggaggttgaagctgcagtgagctgtgtttgcaccactgcactccagcctgggtgacagagcaagatcctatctcaaaaaataaattaataataaggccgggtgcagtggctcacacctgtaatcccagcactttggtaggcccaggccagcagatcaccagaggtcaggagttcgagaccagcctggccaacatggtgaaactctgtctttactaaaaatacaaaaattacctgggtgtggtggcgggcgcctgtaatcccagctactcgggagcctgaggtaggagagtctcttgaacctgggaggtggaggttgcagtgagctgagatcacgccactgcactccagcctgggtgacagtgagaccctgtctcaaaataaatgaataaataataaattatgatgattattaaattctggtaagacactagtgggtctggggaattgtctcggggtccttaggaggaagcctaaagaaggggtgactgccccaccaccccccaccccaggatctcaatgcaggaaactgactacttagggctcagcccagagaatgcaaaccagaaggaactcaaaccagaacagcagcttctctcccggcttctgtttgggcaacttccaaggccccagatggaggcagctgggccctgtagcctcacggtgggagtagagaacccagctcagcccatgcagaggggatggggcacaaaggaaccctgcccagggccctgaggacctcaatccctcaattcctccttccccaacctcttctgtttattggattcctcctgatccttttctgggctccaagcctcagtttctctatctgtagaatgggcatcaacacagcccctgcctcctagagtggttctgagctttaaaggagttacctggggctttgggagttagagatgaatctgcctagatcctgtcctgccaggggaggtcattttgtggtctgttctgcaaagaggaactgggttctggccgagggaggaactagccaagccttgtggccagagaggaggaagaggggaatcctgacagaagtggggagtacgggcttgggctggggggtttcggccttggtttaacccagctggaaggagtgtggaggtgggagtggggatctctgccttccacccacctaaggggtactaaatttgaacacagtggctgagtggtccggggacctccaatctgcaccccaaacacccgccctctgaagctgtgctcataacagaccccaaaattcccctggaagcccctccagggttgaattggggcaaatgagtggtgagtcattccttcccttaggcccaggaagtgactcatgcccagccgttgtcctggtccccatccctctgcccgacaccccccttcaggtctccctggattattggggtccccagtattcccagatcggcagggactggacgtcccctcccagcccgccccaggccccacctgccgctcatatcccaacgccctccgttcccctgcccttcccctctgtttccatccaccctcctttctcatggttttctttcttcctcactgtttatctctctgtctctctgttctctctgtcccatctcctcctgtttccccttctgctctttatgggccccttgtttctctctccacctctctctatcaccatgtaatttctgtctctctgtctgtctctatctctccgtgtctctgtctcctctgtcttatatttctctagctgtcttctttctcctctctgtctccctctctctctccagcttgtctcctttctcctctctgtctccgtctctgtccctctatctctctgtctctctctctctttgttcttttcttttctttcttttttttttttttgagactcttgctcttttttttttttttttttttttgagagtcttgctctgttgcccaggctggcgtgcagtggcgggatctcagctcactgcaacctctgccttctgtgttcaagcgattctcctgcctccacctcccaaatagctgggattacaggcgtgtgccaccatgcccggctaattttttgtatttttagtagagatggggtttcactatgttggccaggctggtctcacactcctggcctcaggtgatccatctgcctcggcctcccaaagtgctgggattacaggcgtgaaccaccaagcacagccccccaccttctgtctctctgtctctttgtgtctctgtctctctttctgtgtctctctttctttctgactctttctctctctctgtctgtctctctctctctctaatctctattttctctccacccctgcttctttgtctctatctctctggtgaacagcaaggagatccctaggtccccatctctgaatcccctggtgacctgaggagggtcccccagaacatgccttgggagggggaaccccctgagtgctgggaaccgccactccacgtgcaccccaacaggcggctacagcgtcttcctgtgggaggggggcccgggggtgaaatatcaccactgggttccaggacagaccgccagggccagtggcagttgtgggtgtggtgtgtgtgcacctgtgtccctgaggaagcgtggaggtccagggcatctcagagcctgggtgatccaacaccgtcatttttttttttttttttctgagacggagtcttgctctgtcactcaggctggagtgcagtggcgtgatcttggcttgctgcaactctgcctccttagttcaagcgattctcaagcctcagtctcccaagtagctgggataacaggcacccaccaccacgcccagctaattttttgtattttcagtagagagggggtttcaccatattaggcaggctggtctcgaactcccgatctcaagtgatccacccgcctcggcctcccaaagtgctgggattacaggcatgagccactgtgcctgaccacgccttcatttttacctaaagaaatgaagatggcaggcagggcctggcggcttgtgccagcactttgggaggccaaggcaggtggatcacgaggtcaggagatcgaaaccatcctggctaacatggtgaaaccccttctctactaaaaatataaaaagttagccaggcgtggtggtgggcgccagtagttccagctactctggaggctgaggcaggagaatggcgtgaacccgggaggtggagcttgcagtgagcagagatcacaccactgcacttcatcctgggcaacagagcaagactccatctcaaaaaaaaaaaaaaaaaaaaaaaaaagagaggccgggcgcggtggctcacgcctgtaattccagcactttgggaggctgaggcgggcggatcatgaggtcaggagatcaagactaccatcctggctaacatggtgaaaccttgtctctactaaaaatacaaaaaaataagctgggcgtggtggcgggagcctgtggtcccagctactcgagaggctgagacaggagaatggtgtgaacccgggaggcggagcttgcagtgagccaagtttgcaccactgcactccagcctgggcgacagagcaagactccgtctcaaaaaaaaaaaaaaaaaaaaagagaaatgaagatggcaggctgggcacggtggctcacgcctgtaatcccagcacttttggaggccaaggcgggaggatcacttgaggccgggagttcaagaccagcctggccaacatggtgaaaccccgtctctacaaaaatacaaaaaaatcagccgggcttggtggcgggtgcctgtaatcccagatactctggagactgaggcagaggaattgcttgaacccgggaggtggaggttgcagtgagccaggatcgtgccatcgcactccagcctgggcgacagagagagactctgtctcagaaaaaaaataaaataaataaataaataaaagaagaagaaatgaagatggcagtaaatgctcaggcacaccggacagcagtcatgtggtttactcccacacacactacactggggagtgggcgccatcatccctattctacagagggaaactgaggcagagaggcccactgtctgggatttgaactggggatgcctggctcctgtctgttttcttagccactccccacacaccccaggtcagaagagcagcagctggagctgagacccccaccaggctcatggcccttccctactcagttcctgaaactccaccctcaagccgagctcgggaggctgaggcggggaggatcgcttgaggccaggagttcaagatcagcctgggcaacagagcaagactctgtctgtaaaataattttttgaattatttttaggccggccacagtggctcatgcctgtaatcccagcactttgggaggccgaggtgggtggatcacgaggtcaggagatcgagaccatactggctaacacagtgaaaccccatctctactaaaaatacaaaaaattagccgggtgtggtggtggacgcctgtagtcccagctactcgggaggctgaggcaggagaatggcatgaacccaggaagcggagcttgcagtgagctgagatcatgccactgcactccagcctgggtgacagagtgagactccgtttcaaaaaaaaaaattatttttaattttttggcctggcatgataaattattttattttaaaaattttgagtcaggaaatgtggctcacgcctgtaatcccagcactttgggaggccaagacaggcagatcacctgaggtcaggagttcgagaccagcctggccaatatggtgaaaccctgtctctagtaaaaatacaaaaaattagccgggtgtggtggcagactcctgtaatcccagctactcaggaggctgaagcaggagaatcacttgaacccaggaggtagagattgcagtgagccaagatcacagcattgcacttcagcctgggcgacagagcaagactctgtctcaaaaagaaaaaaaaatttagtgcacacctgtggtcccagctacttgggaggctgaggcaggaggatctcttgagcctaggaattggaggctgcagtgagatatgattgcaccactgcactccagcctgggtgaccaagcaggagcctgtgtcaaaaaaaaaacaaaaacaaaaaaacccgcccctatgggaacagggtgacagactctttggctttgagcatctgagtgggacatgacatctgctcactctgaacgaccgtcaggatctgagcctgagaggggtcagcatcctcctcccacaaagtgcatcacccttacgcctcctttcccaccctgggatcccctctgaccccctttcctttctctgttgcagcattctgtgtctggctgactctgccgggagctgaaacccaggactccaggggtgagtctgctgggaagcagaaagcacagtccacagccagagcctggggagggtcctggacccccgcccagcccccttcagcccagggaaagagagggctcgcgcacgagaaactcagcgccctgccccatctcccccagtgccccctttttgtgtattcccttacccctcaccttctgaccgtgctccctgctcttgcaggctgtgcccggtggtgccctcagaactcctcgtgtgtcaatgccaccgcctgtcgctgcaatccagggttcagctctttttctgagatcatcaccaccccgacggagacttgtgacggtacagaggcttgagggcagcgcaggggacatccgcgattatgaggcattgcccagccagtgggggacagaggttgttgtgaggggccacagccttaccttccagactatcatcatggccagagaaaagaaaaagagggcaggcgtggtggctcacgcctgtaatcccagcactttgggaggctgaggcgggcagatcgtttgaggccaggagtactcagaagactgaggggagaggattatttgagcccaagagtttgaggctgcagtgagctatgattgcaccactgcactctagcctgggcaacagaatgagatcgtgtctcagggagagggagaggaaggggaagagggagagggggagaggaaggggaagagggagaggggtagggggagggagaaggggaggggaagggggaaagggagggggatggggagggagagggggaggggaagggggaaggggaggggaaggggaggggaagggggaaggggagggggatgggggagggaggggggaaggggaggggaaggggagggggatgaggagggagacggggaaggggagggggaggcagagggagaggaaaggaggcaggaaggaaggaagggaggaagggagggagagagataggcccggcatggtgggtcatgcctgtaatcccagcacttcaggaggccgaggtggacagatcacttgaggttgggaattcgagactagcctggccaacatggtgaaacctcctctctatactaaaaacacaaaaaattagccgggggtggtggtggtcacctgtaatcccagctactcgggaggctgaggcaggagaatcgcttaaacctgggaggtgaatgttgcagtgagccgagattgcgccactgcactctggcctgggcgaccagagcaagactttgtctcaaaaaaaaaaaagagagagacagagaaggagagaaagagaaagaaaagtaggcccggcatggtggcttacgcctgtaatcccagcagtttgggaggccaaggcgggcggatcacctgaggttgggagttcgagaccagcctgaccaacatggagaaacctcatctctactaaaaatacaaaattaaccgggtgtggtggcccatgagcacatgcttgtaatcccagctactccgggggctgaggcaggagaatcgcttgaacccgggaggcggaagttgcagtgagccaagaccgtgccattgcactccagcctgggcaacaagagtgaaactctgtctcaaaaaaaaagagaagaaaagaacaagagagagagggagggagggagggaaagaagagggagggagggaaggagggaggaaggaaggaaggaaggaaataagggaagaatatgaagggggagaagtaagaagtgaataggcatggcttcctggagagagagaagctgggtgctcaggaatctggagtctgtgcctcagtttacccttaagactggggagggggtacattctggctatgaggtttttttttccttttttttttttttgagacagagtctcactctgtcacccaggctggagtgcagtgacccgatctcggctcactgcaacctccacctcctaggttcaagcgatcctcctgactcagcctcctaagtagctgtgattacaggcatgcaccaccatgcccagataatttttgtatttttagtagagacggggttttgccatcttggccaggctggtctcgaactcctgacctcaggggatccacctgcctcagcctcccaaaatgctgggattacaggcgtgagccactgcacccggccgccatggggtttaaatttctacaaagagactggggatggggatgtggagcttcctgtccatccctcacctcagcactgttcactgtgtccaaatctaagatgccagccagagaactaagatcaagtgtggtcttcaggaatggcttgctccagctgcagcatagcctgtgcagtgcaacttaagattttttccaaaagatactaagcagcaggccccatgttggggagtcaggatgggggtctctgccctgacagaactcacatctttgggaggtgactccctgtcctgttgtgttccagacatcaacgagtgtgcaacaccgtcgaaagtgtcatgcggaaaattctcggactgctggaacacagaggggagctacgactgcgtgtgcagcccgggatatgagcctgtttctggggcaaaaacattcaagaatgagagcgagaacacctgtcaaggtaagaaccaccccacgtcctctgactttccatccatgaggtttggggtcaccagagccattctggcagcatccagagagcagggccttggttgtagggtcagtgcctggcgtctgagatgggacaggtgcacatgtacctaccccaccaccccagagaggcagagtgatgtgaggattaagggctgactctgggaccagctgcctgggccaaatcctgataaccaagtgtatgacgttggccaggatacttattcagaaaccgctgtccacatgtgagatgtgataacgttatcatgcttgtaattccagtgctttgggaggctgaggcgggaggatctcttgaggccaggagttcaagaccagcccatagcaacatagcaagaccccacccctataaaaggggaggcgaaggcaggtagattgtttgagcccaggggttcgagaccagcatgagcaagcgggtgaaaccccatctctacaaaaaataccaaaaaaaaaaaaattaattagccaggcatagaggcctgcgcctgtagtcccagctactcaggaggctgaggtgggatgattgcttcaggctgggaggtcaaggctgcagtgagccatgatcaagcccctgcactccagcctgagtgacagagcaagatcctgtctctaaaaaagaaaaaatcaaaccaaagctttcttggaggcaggattttaaaaaattaaaaacattaaatgaaaaaagaactggccgggcgcagtggctcacacctgtaatcccaacactttgggaggccgaggtgggtggatcacaacgtcaggagtttgagaccagcctgaccaacatgatgaaacccccgtctctactaaaaatacaaaaattagccagacatggtggcacgcgcctgtaatcccagctaccagctactccagaggctgaggcaggagaatcgcttgaactcaggaggcagaggttgcagtgagccaagatcgcgccactgcactccagcctgggtgacagagtgagactctgtctgaaaaaaaaaaaaaaaaaaagataggttgggtgccatggctcatgcctgtaatcccaacactttgggaggccaaggtgggaggatcacttcacttgagtctgggagttcaagaccagcctgggtaacatttcaagaccccatctctacaaaaacaaaaatatagacaaggggaagaaagagtccttatcttttatttgttttgtttgtttgtttttgagacagagtctcactctgtcacccaggctggagggcagtagtgtgatctcggctcactgcaacctccgcctcctgggttcaagtgattctcatgcctcagcctcccaagtagctgggattacaggcgtgagccaccatgcccaggctgagtccttatcttttaaagataaaaacaaaagtagctttgacttttgttaaatatagaccttggacaggttactttcaccttgttaaaaggttaaagttactttcaccttgctaaaaggggagtaatggcatttacctacaaaagtatttaacaggctgggcacagtggctcacacttgtaatgctagtactctgggaggccgaggcaggtggatcatctgaggtcaggagttcaagaccagcctggccaacatggcgaaaccctgtgtctactaaaaatacaaaaattagctgggtgtggtggtgcatgcctgtaatcccagctactcaagaggctaaagcacgagaatcgcttgaacctgaaaggcagaggttgcagtgatccgagatgacagcactgcactccagcttaggtgacagagcgagactccatttcaaaaaaaaaaaaaaaatggctaggcgcgatggctcatgcctgtaatcccagcactttgggaggccgaggcgggtggatcacgaggtcaggagatcaagaccatcctggctaacacagtgaaaccccgtctctactaaaaacacaagaaattagccaggcatggtggccggcatctgtagtcccagctactctggaggctgagtcaggagaatggcgtgaacccgggaggcggaggttgcagtgagccgatattgcgccactacactccagcctgggcaacagagcgagactccatctaaaaaaaaaaaaaaaaatcacttaaaagctcctggcttgcagaatgcactctatcagcaatggctaatggggattttattgtaattctgatctgatgcgcccccaggatgggtatccgtagggtgcgagatcagagagcagctgcaaggctctacccctgcgcagaggccacagcctttgctatggtcttgcttgaggccacagctcaggccgggagaaactgggactccaggctttgcctattttccagggaagctggttgggcaggggaggggcttccaggattcacaggggcagatgggagccagcagtgggcagctgggagctgcgactcattcaaagagagggagttagtgcagggtaccgagatcaggaagaggagtggtgcagaggtgggaggtgatgagactcaagactacagagagaagaaagggccggcagcccagatcccagccccacccctcctgccctgcattcaggcagagcacagagggataaagagggaggtgggttgggggacaaggcagagatgcatatacctgggacgtacacctgcgtggagcccagaaggaggcttctgtccgccacactgctagtccccagggcccccttgcaagtggacatcatgttaccccacatgcatgtgacttggccagaggagacagagtcttcatgtgaactggaaaaagatccccctctcccggtggatacatttgacaaacaaaaagtgggctggttttcagcccctgctcatctcattggcccaatacctgtgcagtgagcaacctgcacagctgtacttggtgatcatggtttcctcccagggtgctctggctaggggtgccgcccacccactgctatgaaccccctgcatgggatggtggttgtggttatgaaggaggtgtgttgctgtgttagaaacaggcctgggctgagagaaggggactcagtcaggcagctgggcagagacatggacagcagggctgaggtgataagagggacctccacggacatcaaagcaggtgatggagccaacagcctgctggtttggagcaggacctatgaccagaggtgagacgctcagaggggcctgggcccctccctttaacccaaggcactccaggcttcgctattgcacctgaggacacgtgcacccagtgtcacagcccatggggcctgtgacatccaggccagagacctcgggcggctccctccactcctcacccccctgtctccaggcatctcagggccatcctaaacccctgatcacccgtctttgtcccaaccctgagactcgggacactccacaggaggccactttggaagctcggaacatccccctgcccatctggcatcttatttgcataaaacaaaagggggctggcactcaggatatttcatgggctcatgacatggcgtgtggtggcgcattccagtacagtatccatcctctccgccatcgccggggactgccaggatgagacttgctgccaccggggctcccatgagctcagccacacctggaacccctctgacacccacacctaccataatgaaccccaaaaccctgtccagaaactcaggaggagggaatctcaaggacaggacaactgtctccagccagcagccttgcttggagaagatgcctcccgaccacctttctggccgtttagccctcatccatttccccatccaaggctccaccctaacccaccctggtaattcctgggcctgaacgcaccgtcaatgaccaaagcttgggaggatgctgtggccaggtgtgggcagcgtgatgtggaccccacaaatggattcagagggctgggtgccgtgactcatgcctggaatcccagcactttgggaggccaaggtggaaggatcacttgaggtcgggaattcgagagcagcctgaccaacatggtgcaaccctgtctgtactaaaaatacaaaaattagccgggcgcagtggcacgcacctgtaatcccagctactcaggaggctgaggcaggggaatcgcttgaacccgggaggcagaggtcgcagtgagctgagatcacatcattgcactccagcctgggcaacagagagagacgctgtctccaaaaaaaaaaaaaaaaaacaaaaacgcactcagagggttggatgaaggaggcggctccagcctggactagccggcaagagacagcatcactggggaccatcgtcccaggcccgatcctctcctgtagtcagtcctggtctggaccactcaaggacagagatggaagcttgaaccccattcagcagggcccacaggtctctgtccctggtggaatgacaagggatgagaggacagatacatctgccacccctcacccatcggcacctgtgccctctctagccacaggcccccgctcacggccagttctgcttagatatggattctcaccaaatcctgctatttccatatccatagatcctttcctggggatcagaaaaaagcatctttgtagactcggggctgcctggctggacatcagcccccactgttcaccccagcctggtgcccactgtccgggcagccctagcctgtcccacatcatcccgcactctccccacccctgctattgccctgcatcgcgggggcactggcttagggaggggtcttggtccatgcccatgaagctgggctctcagagctagtgtggatgggagagcagcatcctgctagggccaccaggatgctgagaatttggccagcgagcggccgttctgtgggagtcaggccgagggccaccgttgggaaccaagacgtgtcctgcccaggcgcacggcatgtcccctgcatttggttctcaggaaggccccaccctggcctttgcccggaatccttaggctgggacacagatggctgggacaccccagcttggagctgcccaggaaggcagaggagaaggggaggacttggctgcttccagccacatctggacaacagaaggactgagccaccaccctcaccataggatgcctctgtgtggattggaaaagggaggagacagtggtgccttccagatgcttccgtgccaggaaacatggcggaccctcagccctgaaagctgctcacagctacgggcatccttcaccctctccttcctcttgcagatgtggacgaatgtcagcagaacccaaggctctgtaaaagctacggcacctgcgtcaacacccttggcagctatacctgccagtgcctgcctggcttcaagttcatacctgaggatccgaaggtctgcacaggtagaggccccaggaagacgccgtgaggctggacgggagctggggatggagctgaggcacgtcctccaaagcagccgaggaggagggggaagatccgcaggttcccacaaggtcaaggacctgctaagcccctgcctaaggattcacctcccaggaaggtcctgccacacggcagggaggcggcagggccttcagggctggagtgcccttgtgggcccccagacctcaccccttcctcatctgtcacgtgcgagtggaagaaggtgtcacttccagttctaagaaggggaatctccactatgaccagggagggagcagatgagagtttttagtttttagtcatggaaatctagctcccatgactcagtttcccttttggtttcacctcctataaactggggaccatggtccctgctgtgcccatctggtaggaagaccatcataagatgctttgaaggtgaagttgaaggtcaccaagtggcggcatgtgcaataatggtcttcagtctgaggcaatgaaaagataggggagtgggtgcagtgagtggagggcaggcccaggctggtcagggacagggtttgaccctctggctttgtcctcagatgtgaatgaatgcacctccggacaaaacccgtgccacagctccacccactgcctcaacaacgtgggcagctatcagtgccgctgccgcccgggctggcaaccgattccggggtcccccaatggcccaaacaataccgtctgtgaaggtcgagagctcagatcccacgtttctagcgacccacaaacatctgatcacatgttcaacggcgcccacacaaaccaagcagaatgagcgctggaggcacctggctgtgccaggcgttcgttcattcttctgaggctagatgagaaaagagcaagggtcctccggaaggagctggggtactgagggggaaggctcagggggaccccaggcaacagctgatgactcactgggaggaaggcgtttcaccatattcataacctgctcatctgcacggggcccacctgctgtgcccaggcctctccacgcttccataacccagcgtccaccactccaaggggggcactaatgccgggaggaatgagctgggggcacagacaggagacaggaccctctccaggctgggacaggacctgacccccttcttcctgtcctcagatgtggacgagtgcagctccgggcagcatcagtgtgacagctccaccgtctgcttcaacaccgtgggttcatacagctgccgctgccgcccaggctggaagcccagacacggaatcccgaataaccaaaaggacactgtctgtgaaggtatgacctggccctagaagctccccacccccagcacacacactgacaagcggcctaatgagccgcttgtcttgttccctacagatatgactttctccacctggaccccgccccctggagtccacagccaggtgagtggcccccacagggacgaggcggcgggaactccatccacacagcactgcatccgtctccttgttctaaacttcccacccgccgtccaggctctctgacccccacatctcctctctctgcagacgctttcccgattcttcgacaaagtccaggacctgggcagagactccaagacaagctcagccgaggtcaccatccaggtaagggcaggatgctgggggaccccaggacagtgtagaatcagctagcggaggcttccatgtggccagagagagtgcccaacccaagcaggggcctctagtcagagacacacatgcgcataacatacacacaccacatacagtatgtgcacaaacatacacacccggacacgtgaagacacacgcatgcacacacacacaccaggtataatggcaacagagtgcagcacttaagaacctggagttgaggccgggcacggtggctcacgcctgtaatcccagcactttggaaggccgaggtgggcagatcacgcggtcaggagatcgagaccattctggctaacatggtgaaacccccgtctctactaacaatacaaaaaaaaaaattagctgggtgtggtggcgggtgcctgtagtcccagctactcagcaggctgaggcaggacaatgacgtgaacctgggaggtggagcttgcagtgagccgaggtcgtgcagctgcactgcagcctgggcgacagagccagactctgtctcaaaaaaaaaaaaaaaaaaaaaaagagcctggagttgggccacagaagttcaaatccccccattgccacttcttgctctgtgatctaaggcaagtgacttgccctctctgggcctcggttttctcatctgttttgggggttgtggtgtgtttttttttgtttgtttgcgttttttttttttatttggaaacaaggtctggctctgttgcccattctggagggctgtgacatgatcatggctcgctgcagcctcaatctcccaggctcaagtgaccctcccacctgagcctcccaagtagctgggaccaaaggcatataccaccatgcctggcttatttatttatttaatatatttatagatgggggtcttgctatgttgcccaggctggtcttgaactcctgggcttaagtgatcctcctgcctcggcctcccaacatgctgggatcacaggcgtgagccactgtgtctggccagtttcctcatgggcaacacaggcatgaaagtaatgcctccttcatatagtcagtgtgaagggtaaatcaactaatagaagtaagactcagaacagtgcctgacacatgataagccttatataaaagctttcctggccaagcacggtggctcacgcctgtaatcccagcactttgggaggctgaggcaggtggatcaccagagatcaagagtttgagaccagcctggccaacatggcgaaaccccatctctactaaaaatacaaaaaattagccgggcgtagtggcgggcgcctgtagtcccagctacttgggaggctgaggcaggagaatggcgtgaacccgggaagcggagcttgcagtgagccgagatcccgccactgcactccagcctgggcgacagagcgagactccgtctcaaaaaaaaaaaaaaaaaaaaaaaaaaaaaaattagctggcgtggtggtgcacgcctgtaatctcagctactcaggaggctgaggcaggagattcacttgaacccggaggcagaggttgcagtgagccaagattgcaccactgtactccagccagggcaacaagagtaagattttgtcttaaaaaaaaaaaaaacagttttcccatatgtttttagcacagtagaaaaatgatgtgagccacttaacatcattttaacttttccagtagctagattatttagttagttagttttagagatacggtcttgttttgtcacccaggctggagtgcagtggcacaatcacagctcactccattctcaacctcctgggctcaagcaatcctccctcctcagcctcccaagtattaagagctgagactacaggtgtgagccactgtgcctaattttttcattttttttttttcttttttgtgagacggagtctcgctctgtcgcccaggccggagtgcagtggcacgatctcggctcactgcaagctccgcctcccgggttcatgccattctcctgcctcagcctcccaagtagctgggactacaggcgcccaccaccacgcccagctaattttttgcattttttagtagagatgggatttcaccatgttagccaggatggtctcgatctcctgacctcgtgatccacccaccttggcctcccaaagtgctgggattacaggtgtgagccaccgcgcccagccattttttcattttttgcagagatgggggccttgctatgttgcccaagctggtcttgaatcctgggttcaagtgatcctcccacctcagcctccaaacgcactggaagtacaggcgtgcaccaccgtgcctgttgtctaataactacactttataaagtaaaaataaagttaaattaaagttaagattgcaggccgggcatggtggctcaagtctgtaatcccagcactttgggaggctgaggcaggcagatcgcctgaggtcaggagttcaagaccagcctggccaacatggtgaaaacccgtctctaaaataacaaaaaaaattagccgggcatggtggcgggcacctgtagtcctagctactagggaggctgaggcgggagaatcacttgaacccagaagtcggaggttgcagtgagccaagatcgcgccactgcactccagcctgggagacagagtgagacttagtctcagataaataaataaataaagttaagattgcatttaacctaatagatccaacgtattaaccactttaacatggaatgattttttgctttttttgttttgatctgagatcgtgccattgcactccagcctgggtgacaagagtgaaactccatctcaaaacaaaacaaaaaaaaaattacaaaaattagccgggtgtggtggcacgcttctgtagtcccagctactcagaaagctgaggtgggaggatcgcttgagtctgggaggtggaggttgcagtgagctgattatgccactgcactcaagcctgggcaacagactgagaccctgtctcaaaaaaagaaagaaaaaagaacaggaaatcaaaacagagcctggcaggcagcccgtgcccaaccagtgttaagcgctgtgattcatacgtgcatgcaggcaaatactcaatccgtcgcttgttttctggttactgcatcatctcagtgattcccttgtgcctgtgggtctccagtgtgtcccctggtagggggtgacatccaggtccttcaggcaacccctgtggtctgatgctccagcgattctgtcacccgccaccccctagaatgtcatcaaattggtggatgaactgatggaagctcctggagacgtagaggccctggcgccacctgtccggcacctcatagccacccagctgctctcaaaccttgaagatatcatgaggatcctggccaagagcctgcctaaaggccccttcacctacatttccccttcgaacacaggtgaggccttggcctggcctgccctgccccaaccctgggccccacctggtacctggggtccctaatcacaactgcccctctcccctcagagctgaccctgatgatccaggagcggggggacaagaacgtcactatgggtcagagcagcgcacgcatgaagctgaattgggctgtggcagctggagccgaggatccaggtagcagcggtggtctggagggggagcccgtgggagagagatggaggtgctgggatggggccagggtgaggttcagaatagaacaactgactgggcgcggtggctcacgcctgcaatcccagcattttgggaggcccaggtgggtagatcgcttgagctcagaagttcaagaccagcctgggcaacatggtgaaacccggtctctacaaaaaatacaaaaattagccaggtgtggtggcacgtgcctgtagtcccagttactcaggaggctgaagcgagaggatcaattgagcccgggaggtcaaggctgctgtgagctatgatcacgccaaagcactccagcctggacgacatagtgagaccctgtcttaaaaaaaaaaaaaagtccaggcacagtggctcatgcctgtagtcctagcaccctagcactttggcaggctgaggtagatggatcacccgaggtcaggagttcaaaactagcctggccaagatggtgaaaccccatctctactaaaaatacaaaaattagctgggagtggtggcaggtgcctataatcccagctacttgggaggctgagacagaagaattgcttgaacctggggagtggaggttgcagtgagctgagatcacgccactgcactccagcctgggcgaaagagcgaaactccgtctcaaaaaaaaaaaaacaaggaacaactagaaactgactcatcgggaggggctcctggcgtcatcgtggtggactggctgagcctgagctgggtcatcttgggagggaggatagagcatgggaggaggacaacgggagtaggcagcgagtgtgtctgttccccaggccccgccgtggcgggcatcctctccatccagaacatgacgacattgctggccaatgcctccttgaacctgcattccaagaagcaagccgaactggaggagatatatgaaagcagcatccgtggtgtccaactcagacgcctctctgccgtcaactccatctttctgagccacaacaacaccaaggaactcaactcccccatccttttcgccttctcccaccttgagtcctccgatggggaggcgggaagagaccctcctgccaaggtctctgctcactctgctcacttcctcaaagataacccagggccttcgcacatgctgggcctctctctgggatgctctttcccgacgtgactcagtcttttatgtttctggccttctgatttgggccttccccaacctcattacttatttatttccttactttatttatttaatttaattaattaatttatttattttaagacagagtctcactctgtcgtccaggctggagtgcagtggcacgttctcggctcactgcaatctctgcctcccaggttcaagtgattctcctgcctcagcctcccaagtagatgggattacaggcatgcgccaccacacctcgctgattttgtatttttagtagagacggggtttctccatgttggtcaggttggtctcaaactcccgacctcaggtgatctgcccgccttggcctctcaaagtactgcgattacaggcgtgagccaccactcccagactttcttttcttatttatttatatttttagacaggagggtctcactctgtggcccaggctggagtgcagtggcgcgattatagctcactgcaacctcgaactcctgaactcaaccattcctccagcctcagagttttgagtagctgaggctacaggcatgcaccaccactcccagctaatttttttatttttgatagagacggggacctcactatttttcccaggatggtctagaattcctgggctccagtgatcctcccacctcagcctcctgagtagctgggactataagcgtgcactactatgcccagttaattaaaaacaaaaaaattaatggagatggaggtctcgctatgttgccacagctggtctcaaactcctggcctcaagcgatcctcccaccttggcctcccaaagtcctggaattacttacaggcaagagccatcatcatccctggccaccttctaatgcactatctacattacttattcgttaggtttatgtcataatctgcctctcccactttttttttttttttttttttttttttttgagatggagtttcactcttgtcatccaggctggagtgcagtggctcattctcggctcagtgcaacctccacctcccaggttcaagcgattctcctgcccaggactcccaagtagctgggatttacaggtgcttgccaccaggcccagctaatttttgtattttttagtggagacggggtttcgccatgttggccaggctggtctcaaactcctgacctcaggtgatccgcctgcctcagcctcccaaagtgctgggattacaggcatgagccactatgcctggccacctctcccactcttatgtcaacctcacaagggtaggtacttgtgtgtgccctgttcactgctgtgtctccaaacctgttacattcagtaggcgctcggtcaatactcatctagtaaaaagcagccctcttagactcagcccaagcccaggacctaagagtgagctccaggccaacctttctgaccacccccatctgcccacaggacgtgatgcctgggccacggcaggagctgctctgtgccttctggaagagtgacagcgacaggggagggcactgggccaccgagggctgccaggtgctgggcagcaagaacggcagcaccacctgccaatgcagccacctgagcagctttgcgatccttatggctcattatgacgtggaggtaagtagctggaggcatcctcaagtgcccacaggtaatgaggtccagctgcaaccagacaggcagctagttctccatggagccctactggttgctcagatatatctgcatggttgcacagcccaggtgtccccacgtcacacccttcgcagcctcttcctttggcctcttctctacaacccagcaactatacactgggtgcagccactagctccgctcctctgcctgtccatcccgtaccagttgtgagatgtcaactaaaagctccccatggagagcattccaagggggcaccacttgcccgtttttttttttttttgagacggagtctctgtcgcccaggttggagtatggtggcacaatctcagctagtgaggttcaagggattctcctgccttagcctcccgagtagccgagattacaggcgtgcaccaccatgcctgagtaatttttggtatttttagtagagacagggtttcaccatgttgcccaggctagtctcaaactcctgacctcaggtgatccacccacctcggcctcccgaagtgctgggcttacaggtgtcagccaccgcacccggcctctttttttttttcttttggacagagtcttgctctatcgcttaggctggagtgcagtagtgtgatcttggctcactgcaacccccgcctccggattcaagcgattctcctgcctcagcctcccaagtagctgggattacaggtgcatgccaccatgcaccgctaatttttgtatttttagtagaggcggggtttcactatgttgggcaggctggtctcgaactcctgacctcaggtgatctgccccccctcagcctctcaaagtgctaggattagaggcatgagccaccacacccagcctggagcaccactttctgtacgtgacttcagtaggatccatcgttaagctgggccttgtcgaaaactgcaattaaccaggcagagaaggggggcgcctgtggtccaggccaaaggcccagcaagcacaaaaatgtgaaatccctagactccccttccagctggtaagtgtggccagatctaggagggacaagggaggaggtcagagaggtgggcccgtcaaagtgtgggggggaaaagggaccacaaagagggcaggaaggcctcatgccctgaaggaaccctgagcacccggtgccactcctaggactggaagctgaccctgatcaccagggtgggactggcgctgtcactcttctgcctgctgctgtgcatcctcactttcctgctggtgcggcccatccagggctcgcgcaccaccatacacctgcacctctgcatctgcctcttcgtgggctccaccatcttcctggccggcatcgagaacgaaggcggccaggtgaggtcccgccccgctccctcctgagctctggggtcagggaggcctgggaggggttagccccgcccactcccggggctcagtcgggtaggcgggccctggaggcatgaggccccgcccctgtccgggatctggccccgcccaccggggggtcgggttgtctctttaaagggcgctggctttggagctgcctggccacaccccgagtgcccgctcgcttctgagcgttgttgggggtgggccctggggggaaacctggcccccgctccagacccgcccaccctccggctgtggtcccgcccactctcgggacctggcaggcgactggctctggcgccgcatgcccctccccgcgctgacgtcgctccgcccctccgtccccgccccgcaggtggggctgcgctgccgcctggtggccgggctgctgcactactgtttcctggccgccttctgctggatgagcctcgaaggcctggagctctactttcttgtggtgcgcgtgttccaaggccagggcctgagtacgcgctggctctgcctgatcggctatggcgtgcccctgctcatcgtgggcgtctcggctgccatctacagcaagggctacggccgccccagatagtgagtgcagcgagatggggcaggaggaaggcggggtgctgggcctggggctcacaggcagtgccacacacaatgtccggccgccctccgttccgctcctggcttcctggggcactgatgggacccctcccttccctcctagctgctggttggactttgagcagggcttcctctggagcttcttgggacctgtgaccttcatcattttggtaagtacccactctccctccaccgaagcccgagcgccacaggcccaggcccggctggaccatcgctctcgccctctaacccacaatctgctccctgcccagtgcaatgctgtcattttcgtgactaccgtctggaagctcactcagaagttttctgaaatcaatccagacatgaagaaattaaagaaggcgaggtgagaggagaggctggaaggacttggaggcggggccggggtgaggggcatgaagctggaggtgaggtgggggcccacgctgcaaccccgctcctcgcagggcgctgaccatcacggccatcgcgcagctcttcctgttgggctgcacctgggtctttggcctgttcatcttcgacgatcggagcttggtgctgacctatgtgtttaccatcctcaactgcctgcagggcgccttcctctacctgctgcactgcctgctcaacaagaaggtgggggcctgggcacagtggcgcacgcctgtcatcctcccacctatttgggaggctgaggtgggaggattgcttgagcccagaagttggagaccagcctgggcaacataaccagatgctgtctttacaaaaaaattcaaagatagccagggtgaggcgcctgtaatcccaacagtttgggaggccgaggtgggcagatcacctgaggtcagtaattcaagaccagcctggccaacatggtgaaaccctgtctctactaaaaatacaaaaattagccaggcatggtggcacacgcctgtagtcccagctacttgggaggctgaggcaggagaatcatttgaaccaggagtgcagtgggccaagatggcaccattgcactccagcctgggtgacagtgagacttgtctccaaaaaaaaaaaaaaaagccgggtgtgctgaatacccatctcagcttctcaggaggctggggcaagaggatcacttgggcccaggagttcaaggttgcagtaagctatgatggtgccactacactccagcctgggtgacagggggacccgatctcaaaaaaaagacaaacacaaaaacaccaagaaggtggggctgagggcagagcatggggaggagcgtgcatggtcccagggcctgctcctgccctgacttggtgtctgggccggcaggttcgggaagaataccggaagtgggcctgcctagttgctggggggagcaagtactcagaattcacctccaccacgtctggcactggccacaatcagacccgggtaaggggctgcgcctggggcgggtgtgggcaggaaggcaccagggctagcggggctcaggcctctgggctctcctctccaggccctcagggcatcagagtccggcatatgaaggcgcatggttctggacggcccagcagctcctgtggccacagcagctttgtacacgaagaccatccatcctcccttcgtccaccactctactccctccaccctccctccctgatcccgtgtgccaccaggagggagtggcagctatagtctggcaccaaagtccaggacacccagtggggtggagtcggagccactggtcctgctgctggctgcctctctgctccaccttgtgacccagggtggggacaggggctggcccagggctgcaatgcagcatgttgccctggcacctgtggccagtactcgggacagactaagggcgcttgtcccatcctggacttttcctctcatgtctttgctgcagaactgaagagactaggcgctggggctcagcttccctcttaagctaagactgatgtcagaggccccatggcgaggccccttggggccactgcctgaggctcacggtacagaggcctgccctgcctggccgggcaggaggttctcactgttgtgaaggttgtagacgttgtgtaatgtgtttttatctgttaaaatttttcagtgttgacacttaaaattaaacacatgcatacagaagatggccttgcctgctggtggtgattcagaggccgggcccagggtgtccgtgaaaggccaagatgaccaagaaatagatggggtgggagccaggcttccataataacaagtttattctcatacaatctctagcttctcaacagtggcgcctggaaaggggaggtgaagctgcatgcgggcggctccgggtgggcggctctggcacgtggtggttaccggctctgctcgactgtaagacatgagatgcagtgaactgaagggccgggggaggaaccctctgccccagacccctggccctgcccaaggcacttactgtatgtggagatgtcgatttcctctggaagttctgccacattaacttcaaaccggtcctggacgtcattgaggattttggcatcattctcgtcagacacaaaagtgatggctaggcctttggtgccaaagcgacccgcccgggccacctgcaggcagacaggatcagggtcaggccacagatactacctcaggacttgaggaaaagcagggctggggccccaccccaccgccaggggaaagcaacatgcccgtgaggctgctcacccggtgcaggtaggtgtccgagtcctcaggcatgtcgtagttaaagacgatgttgactcgctcgatgtccatcccccggccaaacagattggtggccaccaggatccgccgctggaaatccttgaactgctgatagcgtgacaggctggggtgcaggagaaacaagtggaggccgtcagacactgggctcctggtggtgctccctgcagccttggcgggcggctcgcactcaccgctcctcctgggccatgccccggtggatggcgatggccgggaagttctgctccacgaggagctgggccagggccatgcagcgctgcactgacttgacgaagattatcacctgagggaaggagtggcagtcagggccacacagtccctgtggcccagtgacctcccgaaggtcctgagccccaggacaggctgatggaagtatcacctggttaaactccagcacatccaagagatcaaagagcttgcggttcttctcactgtctttgagtttgacgtagtactgctgcaggccgtgcagcgtgagcttggtctcgtcgtccacaaacacctccatgggctgtgtgggaagggaggtgggaggggcgggcagggatcacctctgggcatctcgcctgcccagaaccttccagtgggcgactcctttgtgcgacacttcccagaggacctgctgcaccagacctcagtaaacatcgctcaaaagctggatgtaagctctggcccgactcaggtgtggaccaagcttgactcccagtttgacaagaccgaggggaggaaaggaggctccgccggctcccagcatcccagcatcctccgtgccatgtgggccgtgcgggtgtcctggggccccaggctccaggcccctggggaaggccaaagctgccactctcgccctactcacatcctgcatgaacttcctgcacacaggccggatgtccttgctcagggtggcgctgaacatcatgcactgcttctcgtgtggtgtcaggcggaagatctcctgcacatcccgccgcatgtctaggtggggagggcaagacatgggtgggcatgagcgtctgccatgcaggacccccaccccagaccagacccagacccctcccaacctgtgccagggagccagtggcaccgtgacgagggcagagtgagccgcgggagtggccagtcctggtgcctgaggggctggggggtggccagcgagcgcaggcgcgggaggagctgcaatccacttacacgctggcgcggagcagccgtgcccgtgcgcctcgagccacgcttcagggaggggagcctgaggcagagacagccgctggggtgagagctgcagctgcctcccaggacacaagcccatctcccaccggccctgtcggggctcactgagggcaggcggggcctggaaccaacccaacaggtggcagaagcctcatactcccagaggtatgtgtgcatgcctttacgtccaggagggacgggggcttgcttgggccccgtggtcccattcggctcgggctcagaaacagcacatccctctgccagcagcagagctttccccaagatcaccacaggagccccgcctgccggccgcccatgtaacccactcaagagccttccgcctgctatggggcccgcctagtcactgactctcagctggggctgcaagggcagaggactcacccagctgctccagcatcttgtcacactcgtccagcacaaagtgcttcacattctttaggctgaagctcctattccgcacgagcgccaggatgcggcccggggtccccaccacgacatggggacagttcttcttcaacacttcttcatccttcttgatggagagaccaccgaagaacacagacacctatggggatgaggaggaaaccgctccatgctgatacacggcccaaggccccaacctgcacggcccagcacctgcgaacaggaggcctcaggggaccaaggcaggcctgagagcctcccggggctccactcaaaggcagccccaggctgggacctgcgcaggcccctgggagccatgcataattcatcaggcttttaaggagcaaaaaccaccgcaaacctcaaaggcagctgcccctgccaagcttggtaaatgctggctgggccagagccgaggctaacaaagctgcagaaaccaagtggcgcctggtccagtctggcccgagggactcaccttgacgctgggcatgtacttggaaaagcgctcatattccttgctgatctggaaggccagctccctcgtgtggcacatgaccaggaccgtcacctgggaagtggcataagaagagggccttaccttaggcagtgtcctaaaccccttccccaccagagtccacccaacccagtccccctgacactgcacccaacatcacaggccatttgaaggcccggtccaaatgcctcccacttctcacggcccttccccacccctcactccctataccctcccacagctattgaaacctgtctcccaacaccaggacccacaataagaaacagaaaatggaacagaaaatggcccgcataatgtaatggttagacctggcctgcctgggtgacatgggacctggctctctaaggatttcctgaatctcggcactcgggcggccccggtcttcccacccgtgccatcagacactggaccacaccacagccctccacagcaccttcatccttcaggatgtgctctgagataacgagggcacgggcgccaatatgaagcccaaagatgtgcacctggcctgactcgggagcaagacaccagaattcactgaagtgtctccccaggacagtggcacacaagacaatgggagaagacagccagggcctaacagcaaggacagtggtgacagctatattcggggcaacccaaccttcacagatggacactctctaggtaagtggcacggcaaaacagcaacgatgcctctggggcaaggggcaaactgtgggcactttccagttattttggcttattggcaatttctaatttttgttataactaattattttttgagatggagtctacctctgccacccaggctggagtgcagtggtgtgatcatagcacactgcagcctcgacttcctgggctcaagcaatcctccagcctcagcttcccaaagcactgggctaacaggtgtgagccaccccatccagcctactctacttccgccgccacaggcagggtggggccaggaagggaggagcccacccacctgtccgttgacaggctcaatctgctgtagggtggccagcacgaagaccgctgtcttgcccatcccggacttggcctggcacaggacgtccatgcccaggatggcctggggaatgcactcatgctggactgcaggagaagcagagcgtgagggacgagaacctggatgcacccccgtgcaggatcctcaccagttgaccgggggcccacagtgagggcaatcagaagaggccgagtccggacaaggccacagacacctgcagggctggggtatccgcctggtcaaagcagaacgccccactgccgagggcagccacaggccccgctgggcacaactgatccgcgggacagacgggcccctccctcacccacggcaaactggaggcggcaccgctctgggcgggcagggctggtcttgtcttggtgaggacctgggcaagaggataacacccagaaggcgtaccctcagaaggatgctcaaagccacagtccacgatggcccgcaggagctccggcttcagcagaaagtcccggaagccagagctgtggatggaaacgtaggatcccttgatgtctttcttagggggagctggtgtgctctcttgaggagcctggggctcttcctcttcatcgtaatccaaaagatcgttttccacatcctgttctgccatgatgctgagaagagagagaggcagggtcccgcgagtgggcacagaaggatgatgaagcttcattcaaatggcattctctgccgcctccttccatgagtgagcccatcagctctacctgggctgcacctcgcagcttcgccctgtctccacctccccacccccaagctaccccatctctcccccatgcccctctggccacacccacagacagaacaccctccacctccaagggcttcccatggctcacagagttaaaatcccaactctcaccacaggccaggcaatccccttggtttgacccctgctcacctcatcccacaccacccccagccttgttcagctgctcagacccctggagcccctgccccaagcctttgaacctggctgtcaccgccaggaatgctctgcccccaggtctctgcacaaatgcctccttctccacacgcaagcctcagctccagtgaacctcctcagactactcagcccagagaagccccctccctatcactccccaaggaacccactgggctttcatggggcaggagcccaaagatcccaggggtggggctgccaggatgctggtgggaactgagtttgcgagagagcaagcagtatctgtccagccccagcttctcccactctctgtggtctgcacaggggaataattaagtgctctcatgaaaggcctcctattgggcctgggccaataaaaataaagctgagaagatggaaaatggaattaatacaaagtctgcctacctctttgctttattaatctaatgcataccaagtgcctgctgggtgcaagggacccaaacatgaggacaattgtctttcgtcctcctcccctaccccagactccagtggggggtggagcagagggtgacagctgctacaattcttcctgaggctggatgctgaggatcctaggccacttttggcctcgctgtcactcattcccggctcagaaacagcaattccattgtctcaatggctgttttctctctctcaacctccctgtccatgaggcagtgaatcccaccaaggccctctggccagttctcacctatgctaccatgctggccccaagctgctatcacctgttttattattattattattattattattattattattattattattattgagatgaagtcttgctgtcacccaggctgcagtgcagtggcgcaacctcggctcactgcaacctccacctccagggttcaagattctcctgcctcagcctcctgagtatctgggattacaggtgcttgccaccatgcccagctaatttttgtagttttcgtagagacagggtttcaccatgttggtcaggctggtctcaaactcctgacctcatgatctacccacctcagcctcctaaagtgctgggattacaggtgtgagccaccgcgcctggccttattattatttttaactagaacagctttacaggctgcgcgcggtggctcacgcctgtaatcccagcacttttgagagaccaaggcgggtgggtcacctgaagtcaggagttcgagaccagcctgaccaacatggtgaaaccccaactctactaaaaatacaaaaatttagccaggcatggtggcaggcgcctataatcccagctactcgggaagctgaggcagaaaaattgcttaaacctgggaggcggaggttgtgatgggctgaaatcacgcttcactccagcctaaaaaaaaaaaaaaaaaaaaagaaaagcttcacagagatatttacatgctatacaactcaccacttaaggcagataattcagtggtttttagtgtagtcacagacatgtgcaaccactaccacatgtgcaattttagaatacttcatcaccttgaaataaaagctcctgtaccctttacgtatccataccctaaacaccccaccccagccccgggcaaccactaatctgctttctgtttctatggatttgcctgttgttgtggacatttcacataaatgaaatcttataatttgtgacattttgtgtctggcttctttcactcagcacagtgtgctctaccacatcatcagtactcccttccttttttttcccccctctttgagacaaggtcttgctctgttgcccaggctggagtgcagtggcccaatcaaagctcacttcaacctctgcctcccgggctcaatcaagcgatcttcccacctcagcctccctagtagcaggagctacatgcgcccgccaccactaatttttgtatttgtaacagagatggggtttcaccatgttgcccaagctgatctccaacttgtgggctcaggcgatccgcccacctcagccttccaaagtgctgggattacaggtgtgagccaccacacctggcctcatttctttccatggtcacctaatgttccatctcaccaacatactacattttgcttaaccactgtcagctggacatgtaggtgccatcatctcttgcctgaattaagccaatatcctcctccctggtttccctgttgccatcccccagcccctccccagagcagccagaaagaccctatcaaactaagtcacggccaggcgcggtggctcacacctgtaatcccagcactttgggaggcctaggcgggcggaccacctgaggtcaggagtccaggaccagcctgaccaacatggtgaaaccccatctctactaaaaataccaaaaatgtgccgggtgtggtggcgggtacctgtaatcccagctacttggaggcaggagaatcacttgaacctaggaggcagaggttgcagagagccgagatcacaccatggccctccagcctgggcgacagagcaagaccaagactctgtctcaaaaaaaaaaacaaacctaagagtacatcactattctgctcaaaacttttaatgggttcctactgtgcttagaaaaaaactcgagtcctcacaaagccagcctaccgggcccctcctaacccgactcctctatactcatacctcatctcccccattgcccctcactcgccagccttgctgccgtgtctcaaacacacctcagcacctttgcacttgctgttcctgctgcctggaagggtcacaaatcccccacttcttttgggcctcctttgctccagaaaggcatttcctcacagccccaactaaaacagcaccgcttccagtcagccctgccctgtgagaacagctaataagcactccatagcaatggctgaataaatggaactagaataaaggcgttcaggcagagttgaacatgtctctttatctgacccttcaaacaggcaatctgaaggggtcacttcccaggcagcagggaaaacaggagccaagaaaggtcagtccgaaaagcaccagagccttttggggtatgcagagtaggactagctggctggcgtcagggcagaagacaaagctggaagagctggtcagccacacagggcatgtgtttgtttgtttgtttttttgttttttgagacagggtctcgctctgtcacccaggctggagtgcagtggtgcaatcatagctcactggagcctcgacctcccaggcccagtgagtccaccacctcagcttcctgtgtagctgggactacaggtgcatgccaccacgcctggctaatttttgttttagtagagacagtgtttcaccacgtttcccaggctggtcgtgaactcctggactcaagcaaacctcctgcctctgcctcccaaagtgctgggattacaggaatgagccacccaccacgcccagcctgggcctgtgtacttgttaagcaatagggaactgctaattagattggagctgagccactcaatcaggatctgcccaagagtactgtaacttactcctccgatgaaggggtaggttaagaccagtagcagggaaaaccagtcaccaaataaaagagaagtaaccagggtaggggcgtgaggtaaggaaagaaagggtgggacatgccaaaagacaggaacatcccctgaccaatccatgggtagagaaaagccacagtctattctgggctccaaatctaggtggccaagagatggtgtattttaaggaaataaagcaaagttgttttgttggtggggaaataaatttggggcaggcccggcatggtgcctcacttctgtaatcccagcactttgagaagccagcgtgggaggatggcttgagcccaggagttcgagaccaacctggacaataagtcgagaccgcgtctatacaaaaacaatttttaaaaaagtagccgggtgggtggggggaggggggagggacagcattaggagatatacctaatgcaaatgacgagttaacgggtccagcacaccaacatggcacatgtatacatatgtaacaaacctgcacgttgtgcacatgtaccctaaaacttaaaaaaacttaaaaaacacatagcccaaggggcaccttctatgtagcaaaggctaaaaaataaataagtagaaattaaaaaaagaaaaaaattagcccggtgtggtggcatgggcctgtagtcccagctacttgggaggctgtgccgggaggatcgcttgagccaggaggtcgaggctgccagtgatggcgccatggcattccagcctgggtgacagagggagaccctttctcaagaaaaataaatttaaaaaaagaaattggggcccagcgtggtggctcatgcctgtaatcccagcactttgggaggcgaagcgggcggatcacttgaagtcgggaattagagacaagcctgggcaacatggtgaaaccccgtctctactacaaatacaaaaattagccggatgtgcttgcttgaacccggaagacggaggctgcagtgagccgagatagtgtcactgcactccagcctgggcgacagagcaaggctctgtctcaaaaaaaaaaaaaaaaaaaaaaaaagagagagagagataaataaattggggtgaaccgaatctgctaagataaaattttcgagaaaccgggctggacaggatctaaagctcaaaactgattagatcaggaaaggatccggcggggttttccccgcccaaagtgggtggccatgaccgctaaggcgccaggagcgcatgaacttgaaaggtgacagcggggaactcacaacccagacacgccacgtgtacccagttaccctcaagtgtccccaggcaggctttccaccccggagtttattcccacctggggactcctatttccaaaagaaaatctttttttcattctgttttttttgaggcagaatctcgctctgtcacccaggctggagtgcagtgtcgcgatctcggctcactgtaacctccacctcccgggttcaagcgattctcgtgcctcagcctcccgagtagctgggaccacaggcgctcgccaccacgctcggctgatttttttttgtattttgagtagagacgaggtttcaccatgttggccaggctggtctcgaactcctgacctcaagtgatccgccctccttggtctctcccaaagtactgagattacaagagccaccgcgcccggccttccaaaataaagtcttatttgctctaaatctcagaatcccgaatcccgtaaaaagtagaccaagaagaaggtagactgggaaagggatcaagtccctcggacccaaagaaacccctgacaactgaaagctccaacttctcccacccaggccccagaccccggcgtcaccccctcgtccctctccaaatggccccaggccgccgcggggtctattcggacgaactgacagactccaagtggggctcggagcgccgtaggccatgacagcccctccgagaagcgggccccgagccccgagcaccgcgcgccaacggctggcccacccctagcgcatgcgccccggtgcccaacggccaacacacagcgctctgacacaccaaccgccccgcccccaccgtctcgcgaccctttctccccctccccttagatcccaacgtctcccctcgtcctctcgctctcagttcagacgtccccacaccgcggccccgcgcccgggatccgctgctcacctggctccccgttcttctccgcgcgctgctaagagacacttccaacttcggttttccgccgggcgctcagacacgagttgctgcgcttcctgcctcttgcgtcgggctgctgctctgctgactgggccgctgccttttcattcaagagaggccgaagcggtgattgggtcctgtggaagggaccgggagattattggcggagacgggaagaaagagggcgtgccttacgcctcgcgtttattggtcaatctaaaagtaggcgcgccccagtgagccgacagactggctccgacagcgcgcggtctcgtgatctgggtgtggtgctcggtgggagccgccatgtttagtactgataactgaagaccggatgattgcgttttggcgtgtgccccaccttttcgaagagtggcgtctgcgctgggcgctgaaaccagaactgtcccagttgctatcaatctgcggcctgggggtcctccacagtgtaggctctgaaaagaatagggagcttggaatgactcaaatggacagaacattttgcagtatttggatttctatcgctccacgatagttttgtctccttgattttcacgttagtagaagcatgcaataggttgtcttttgtgtctgacttttgctcaacaaagctgtttttttgagacggagtctggctctgtcacctaggctggagtgcagtggcgcgatctctgctcaccacaacctccgcctctcgggttcaagcgattctcctgcctcagcctcctgagtagctgggactgctggcgcccgccaccacacctggctaattttcatatttttagtagagaggggtttcgccatgttggccaggctggtctcgaactcctggcctcatgtgatctgcccatctccgcctcccaaagtgctgggattacatgagccaccctgcctggccgcagcaaagtgtttttgagagttgtccatgttgtggggatatcaacagctcgttattttttactgctgagtggtatttcattgtgtggctatactataatgtagccaatatagtttcactcacctgttcttggccaattgattgtttccggtctttggccactgttaatagagcttgtactgtaagagtattttggggaagataaattttcatttcttttaaatacttaggagtggcatggtggcatggtcactaagctttattagatcctggcagatttattttcctatcatccttcctccctctttccctccactttcttctttctttcttcagggtgtcactcttgttacctatcatgcccagctaatttttaaaaatttggtaaaggtggggttttgcaggccgagcgtggtggctgacacctgtaatcccagcactttgggaggccgaggtgggtggattacctgaggtcaggagtttgagaccatcctggccaacatggtgaaactccgtctctactaaaaatagaaaaattagccgggcgtgttggcgggcgcctgtaatcccagctactcgggaagctgaggcaggagaatggcgtgaacccgggaggcggagcttgcagtgagccgagatcgcgccactgcactccagcctcggcaacagagcgagactccgtctcaaaaaaaaaaaaagaaaagaaaagaaaaagaaaatgccaagtaaagaaaggatcagcgggcaccagggctcctgcctataatcccagcactttgggagaccaaggagggcggttcacttgaggtcaggagtttgagaccagcctgacaacatggagaaaccccgtctgtactaaaaatgcaaaattagccgggcgtggtggcgcatgcctgtaatcccagctactcgggagggtgaggcaggagaatcgcttgaacctgggaggtggaggttgcagtgagccgagttcgcaccattgcactccagactgggcaacaagagtgatcacctaaggccaggagttcaagaccagcctaggcaacatagtgagacctcatctctacaaaaaataaaataaaataaaataaaaattagccaagcatggtggttgatacctgtactcccagctactcgggaggctgaggcaggaggactgttcgagcccaggagtttgaggcttcagtgagctatgattgcaccactgcactccagcctgggtgaaagagtgagacccagtctctaaaataaatgaataacacattgtaattaaagtcaaagtcacggccgggtgtggtggctcacacctgtaatgccagcactttgggaggctgaggcgggcagatcacctgaggttgggagttcgagaccagcctgaccaacatggagaaccctcgtctctactaaaaacacaaaattagccagccgtggtggcatatgcctgtaatcccagctattcgggaggctgaggcaggagaatcgcttgaacctgggaggcggaggttgcgttgagccaagatcgcactattgtactccagcctgggcaacaagagcgaaactctgtctcaaaaaaaaaaaaaaaaaaaagttgaagtcacctgtgcttcactccaactcctttcctcccagtacagaaacaatgccctaaagaaaaacagtcgtactgaacagttactgcacccacctttacaagaattacagtcatggggtcacataatgacacggacatgttgaggaatgtctccataggcaatcttgtcattgtatgaacatcatggagtttgatacagtttggatgtttgtcccctccaaatctcatgttgaaatgtgatccttcttgagcccaggaggttggggctgcagtgagccatgtttgtgccactgcactccagcctgggagacagagtgagactgtctcaaaaaaaaaaaaaaaaaaaaaaaagaggaaagaggccaggtgcggtggctcacgtctgtaatcccagcactttgggagctgaggtgggcagatcacgaggtcaggagatcgagaccatcctggctaacacggtgaaaccccgtctctactaaaaatacaaaaaattagctgggcgtggtggcggacacctgtagtctcagctacttgagaggctgaggcaggagaatggcgtgaacctgggaggtggagctggcagtgagctgagatagcgccactgcagtctggcctgggtgaaagagtgagactccgtctcaaaaaaaaaagagaaaaaagaaaaagaataaaacaaaaataaagaagaaagaggaaggaaggaaggaaggggaaacgaaggaaggaagccaggcaggcagacaggtgatccgcagtgttggatgtgggacctagtgggaggtctttttggtcacaagggtagatccctcatgaatggcttagtgacatttccatggtaaagtgagttctccttctattcatgagattgctgatcgtttaaaagagcacggcactgctatcctctctcggtctggcttccttcctgtctcaccatggaatgcctgctccccttccccttcaactatgattggaaactttccgaggccctcccagaaacaaatgctagtgtcatgcttctggtacagtctgcagaactgtgagccaaataaacctctttataaattacccagactcaggtattcctctatagcaatgcaaactgacctagacaagggaacttagataaacctagatgggtctgggcatggtggttcattcccagcactttgggaggccaaggcgggtggatcacgaggtcaggagttcgagagcagcctggccaacatggtgaaacactgtctgtactaaaaatacaaaaattagccgggcatggtggtgcgcacctgtaataccagctactcaggaggctgaggcaggagaatcacttgaacccaggaggcggaggttgcaatgagccgagatcctgccattgcactccagcctgggcaacagagtgagactccatctcaaaaaaaaaacctagatggtatggctactacacgtgtaggctatgtggtatagcccagcagtccccaacctttttggcaccagggacctgaatgatggaagacaatttttccatggacgtaaggagggtggatggttctgggatgaaattgttccacctcagatcatcaggcattagttagattctcataaggaatgggcaacctcgatccctcacatgcacagttcacaatagggttgagctgctatgagaatctaatgctgttgctgatctgagaggaggcagagctcaggctgtaggtaatgctcacccatcactcacctcctgctgtgtggcctggtccctgacaggccacaaggccagggaggggtgggggtggggacccctgctatataaagcctactgctcctaggctaccaacccggacagtgtgtaactgtctgaatactgtaggcaattgcaacacaatgctaagtatttgttttgttgtttttaccttcatcttctttgtgatgttacaatggtaggtatttggatatctatacatatcaaaacatagaaaaggtactgggtgtagtggctcacacatgtaatcccagaactttggaaggctgaggcaggaagttcaagactagcttgggcaatgtggtgagacctcttctctaccaaaggaaaaaaaaaaagctaaaaagctacttcatataaatttcctttcatttccctttttatttttcccatttactttttttttttttttttttttttttgagacggagtttcactcttgttccccaggctggagtgcagtggcacgatctcggctaactgcaaccaccacctctcgggtttaagcgattcttctgcctcagccttccgagtagctgggattacaggcacctgccaccatgcccgactaatttttattttttttcaaacagggtctgggccaggcacagtggctcacgcctgtaatcccagcactttgggaaccgaggcgggtgaatcacctgaggtcaagagttcaagaccagcctggctaaaatggagaaaactcgtctctactaaaactacaaaaattatctgggcatggtggcaggcacctgtaatcccagctactcagttgtctgaggcagaataatcttgtgaacctgggaggtggaggctgcagtgagctgagatcacaccactgcactccagcctgggcgacagagcgagactccgtttcaaaaaataaaattacatgatataaataaaaagaaaaaaataaacagtctggctttcactcgggccatagtgccaggtgagatctcagctcactgtaacctccacctccttggcccactaatttttgtatttcttagaagaaatgaggttttgccatgttgtccaggctgctctggaactcctgagctcaagcaatcttcccgcctctgcctccccaaagtgctaggattataggcatgagccaccccgcccagcctcctttactttatacattttttcactttatatatatatgtgtgtgtgtgtgtgtgtgtgtgtttgatacaaatggtatcagactgcatcattttgttcctttctttctctttagtatcattaaaaaataactagaagctgggcccagtggctcctgcctgtaatcccagcactttgggaagctgaggtgggtggatcacttgaggtcaggagctcaagaccagcctggccaacatggtgaaaccccatctctactaaaaacacaaaaaattagccaggcgcggtggcacacgcctgtaatcccagctactcaggaggctgagacaggagaattgcttaaacctgggaggcagaggttgcagtgagccgagatcgtgccattacacttcaaactgggtgacagagcaagattttgtctcaataataataataataataactaaagatgatgctctccctatgctgcccaggctggtctagaactcctgtcctctgcaatcctcccacctctgcctcccaaagtactgggactacaggcctgaggcactacgcttagtccttttttttttttttttgagagagtcttgctctgtcgcccagactggagtgcagtggcatgatttcggctcactgcaacctctgcctcccaggttcaagcgattctcctgcctcagcctcccgagtagctgggactacaggcgcccaccaccacgcctgactaatttttatatttttggtagagacagggtttcaccatattggccaggctgctctccaactcctgacattgtgatcctcccgtctcggccttccaaagtgcttggattacaggcataagccaccgcgcctggcctttttttgtatttttagtagagacggggtttcactgtgttagccaggacggtctcaatctcctggcctcgtgatccacccacctcggccttccaaagtgctgggattacaggcgtgagccaccgtgcccagcctaccttgcagttttctagcttgtctttcccaagtttactccagtacctgcccttcagggaagcctacactgactgcttcctctgaagtgcgacagctaccccctccagcctttgcagtctgggatacctttcgcctgatacctcatactgtgcccactcattcctttcacaaagacggacgtagcacaggctctgtgcaatttcagggaggagtaacatgcaaaataatcaaacagggccaagggccagaaatgacgtcggtgtggtctaggaagattgctcagaagatgttacatttaaacagataactaaatgagcaaaaggggccagccctggaaagatgtgatagaaaagcattccagaacagataacagccagtgcaagggccatgtggttggaagtaaggtgagactatttgtttttgtttgttttttttttgacggtgggaggtggtttgtttttttgtttctttggtctcactctgttgcccaggctggaatgcagtagcatgatttttgttttttatttgaaacggagtcttgctctatcacccaggccagagtgcatggcactgtctcggctcactgcaacctctgcctcctgggttcaaacagttctctgcctcagccacccaagtagctgggattacaggtgcccaccacaacacccagataatttttgtatttttagtagagatggggtttcaccatcttggccaggctggtcttgaactcctgacctcgtgatccacctgccttggcctctcaaagtactgggattacaggcgtcagccaccgcgcctggccttttttttttttttttttttttttttgaggtggagtctcactctattgcccaggctggagtgcaatggcatgatcttggctcactgcaatctctgcctcccaggtttgagttattctcctgcctcagcctcccaagtagctgggattacaggcaagcaccaccacgcccaactaatgtttgtattttccatagagatggagtctcactatgtgggtcaggctggtctcgaactcctgacctcatgacccgcccacctcagcctcccaaagtgttgggattacaggcatgagccaatcgctggcctttttttttttttttttttttttctgagagagtcttgttctattacccaggctggagtgctatggcatgatctcagctcactacaacctccgcctccctggttcaagcgagtctcctgcctcagcctgctgagtagctgggattccaggtgccggccaccacgcccagctaattttttttatttttttagatggagtttcactcttgttgcccaggctggagtgcactggtgcaatctcgactcactgcaacctccgtctcccaggttcaagcaattcttctgccttggcctcccaagtagctgggattacaggcacccaccaccacatccagctaattttttgtatttaataaagacaggtttcaccatgttggtcaggctggtcttcaactcctcacctcaggtgatccacctgcctctgcctcccagagtgctgggattacaggcacgcacagcccagtggcacaatcttggctcactgcaacctccacctcctgggttcaagcgattctcaagcctccacctcccaagtagctgggattataggcatctgccaccacagctggctaatttttttttgtattttcagtagagatggggtttcaccatgttggacaagctggtctcgaactcctgacctaaggtgatcaacctgacacagcctcacaaagtcctgggattccaggcatgatccactgtgcctggccaaggtgagactatttgaagaacatagtgaaggctaatgttgctggatgggggtgaggagagtgaggtgtttggacaggtgggcagagaagtctgacaagaccaccttgtagaccaagtgaggagtatgaagtttttcctaagtctgctgggaaaccaggcacaggcacgttttctagcagggagaagcagggatggtgatggtgtgatttaggatttccaaggccccagagtgaattagagaggggtgagaacagctgcaaggatgtgccggtgcagttatcatattttgttgagattgtacaattagtcctttgtctctccccctgacactttttttttttttttttttttttttgtcttgctctgtctcccaggctggagtgcagtagcatgatcttggctcactgcaacctctgcctcctgggttcaagcgatctcctacctcagcttccctagtagttgggattacaggcgtgtaccaccacacccggctaatttttgtatttttcgtagaggcggagttttgccatgttggccaggatggtctcaaactcctgacctcaggtgatccacctgtctcggcttcccaaagtgctgggattacaggcatgagccactgtgtccagcaaccaccaccccgctccttttttatttttattgtttttgagacggagtcttgctttgttgcccagtctggagtacggtggtgcgatctcggctcattgcaacctctgcctcccaggttcaagcaattctggtgcctcagcctcctgagtagctgggactacaggcatgcgccaccatgcctggctatgtctccccgccccctttcttggtttgtttgtttgttttttgagacggagtcttgctcttgttgcccaggctggagtgcaatggtgcaatcttggcttgctgcaacctccacctcccggattcaagcgattctcctgccttagcctcctgagtagctgggactacaggcactcaccaccacacccagctaattttttttgtatttttagtacagatggggtttcaccatgttggccaggctggtctcaaactcctgatctcaggtgatccacccacctcggcctcccaaagtgctgggattacaggcttgagccaccacacctggccacgtctccccttttagcaaacaaagtgtggctggacgtggtggctcataactgtaatcccagcagtttgggaggccgaggcgggaggatcacttgaggccaggagttcaagaccatcctgggcaacacagtgagacttcatctctgcaaaaaaaaaaaaaaaaaaaaaaaaaaaagaattagctgggcatggtagtgcatgcctgcagtcccagctactcaaggggctgaggtgggaggatgacttgaacctgggaggttgaggctgcgctgcagtgagctgtgatctcacccactgcactctagcctgggtgacagaatgagactttgtctccaaaaaaaaaaaaaaggcctgaactgcaactttatctccagtgccaccaaattccccagtgggtctctgtaaatattcactgagtaaatgaatgcctgaagggtggagcgagaatttggctggtttccccagctccatctggggaggcagcctgggacctcacaggttggggagggagggcccatccctgtgcaaggtggttccagacaacccaatccttcggcccccatgaaacctcactctgccttgtcctcctcatctgtagaatgggtgggctggagaattagagggagctacttcgtttctcagggaaagggccatagacatcctggcttgatgattggggtaagggacttctcagcttactcacctgcaaaactggagcaaaagaactagtttgggccaagcttgatggctcatgcctgtaatcccagcatttcaggaggccaatgcagaagaattgcttgagcccaggagttcaagaccagattgggcaatattacgagatccagtatctacacacacacaaaaaaattttttgaaaaaactagccagacatggtggtgcacacctgtggtcccagctacctgggaggctgaggcaggaggatcgtttaaacctgcaaggtggaagctgcagtgagctgcgatggcgccactgcaccccagcctgagtgacagagtgagaccctgtctctaaataaataaatatcaggctgggcgcggtggctcacacctgtaatcccagcactctgggaggccaaggtgggcagatcacctgaggtcaggagttcgagaccagcctgcccaatgtagagaaaccccatgtctgctaaaaatacaaaattagccgggtgtggtggtacatgcctgtaattccagctactcaggaggctaaggctgggaattgcttgaatcagggaggcagaggttgcgttcagttgagatcgtgccatcacacttcagcctgggcaacgagagcgaaattctgtctaaacaaacaaacaaacaaataaataaataaatatgaaagaactagcttgcagagtttttttttgttttttttttttttttttttttgagagggagtctcgctctgtcccccaggctggagtctcgctctgtcccccaggctggagtgcagtggcgtgatctcagctcactgcaacctctgcctcccaggtttacgccattctcctgcctcagcctcccgagtagctgggactacaggcgcccgccaccacgcccggctaattttttgtatttttagtagagatggggtttcatcgtgttagacaggatggtctcgatctcctgacctcgtgatctgctcgtctgggcctcccaaagtgctggggtgacaggcgtgagccaccatgcctggccatgagttcttttcttttctcttttctttttctcccttcccctccctcccttccttcctctctctctctctctctctctctctctctctttctttctttctgacagtcttgctctatcacccaggggggtgtgcaggggtgcgatcttggctcactgcaacctccgcctcccaggttcaaaccattctcctgcctcagtctctcaagtagctgaatatacagatgcccgccagcacacctggctaattttttaatttttagtagagatggggtttcaccatgttggccaggctggtctcgaattcctggcctcaagtgattcaccccccttgacctcctaaattgctgggattacaggtgggagccactgcgcccagccacagagttctttcttttattcaatcaacaagcatttgagaaacagttagaaggctcatgtggctggaaggagtgagcaagggggagagatgggaggaagtaagaactgatggtgcagagcttcgtgggctgtggggaggacctgagttttttccctgagtgagctgggagccatggagggttctagacagaggaggggcataccccatctcatgtgttcactgctcccttgggctgttgtgggaacagactgtgggggcgagggcaaaaccaggagaccaggagagaggtgactactggttaaggtgagtgatggtagggactggatgcgacaaagtggaaaggtgaaatgtgggtgaattctgggcttgtgtgtgtgttgttgttgttttctttctctttttttttttttttttgagagggagtctcgctctgtcgcccaggctggagtgcagtggcgcgatctcggcacactgcaagctccgcctcctgggttcatgccattctcctgcctcagcctccctagtagctgggactacaggcgcccgccgctttcaccatgttagccaggatggtctcaatctcctgacctcgtgatccgcctgcctctgcttcccaaagtgctgggattacaggcgtgagccaccacacctggccccctcttttttctttttttagatggaatcttgctctgtcgctcaggctggagtgcaatggcacgatctcggctcactgcaatctccgcctcttgggttcaagctattctcctgcctcagccacccgagtagctgggattacaggcatgcgccaccacgttcagctaattttatattttttagcagagatgggtttcaccatattggctaggctggtctcgaactcctgacctccagtgatccatccaccacccaccttggcttcctaaagggctgggattacaggggtgagccactgcacccagccgtttttttttttctttctttttttagacagggtctcgctctgtcacccaggctggagtgcaggggcatcatgatttctccccacagtgatgcattctcggcctcttgagctcaagcgatcctcccgcctcagcctcctggtagctgggactacaggcgtgcgccaccatgcccggctggatgggttctggatcagcataattctcctccttctctctttctgttgttagtatctcccaaagagttgctcagaggaaaaaataagagagaaaacatcgcgccctggtttctgggacgactgaaaccacgcagagccacgggtaaccaaggtacccgcagcccacggcgcttcctcgggtcccaaagggcgccaatgtgcaggcaccgccgccagggagcgctccctgccggagccccggagaccaaggtttggctccctcgcctggtttccgaaggagtgagggtccgacggcggccacgaacaaagctgcacgctctgcagaccccggagatcccctagaaattccgcagaggcctccactctccgcttgggcacgagtctgcatttatggagcgccatctgcatgcagcagccccgaaaaagaaggcgatgcccattttatagcggggaaaactgagactcagaggccacaggggtccccaggatgaacagcaagttgggattcaaacctcttttaataacaataacgataatagaggctgggcgcggtggctcaggcctgtgtaatctcagcactttaggagaccgaggcgggcggatcacctgagatcaggagttcgaggccagcctggccaatatgatgaaaccccgtctctactaaaaatacaaaaattagccgggtatggtggtgggcacctgtaatcccagctactcaggaggctgaggcagaagaatcacttgaatccgggaggcggaggttgcagtgagccgagatcgcgccactgcactccagcatgggcaacagagcgaaactccgtccaaaaatagcaaaacaacaaacaaacaattacgataacattaaaagtgacagcagctaacacttatggagcgtctagtgtgttctcagctcttggcctgcactgtcttattgaattttaccaacaccgaggaggtgagcgcatcattcccatttcacagatgaggtgcctggaagggtttgtctccctcaaggcgtaaagcgctaggatttgaatgcagatccgcccagagcttgtctccaggtaacggggaaacttccatgcccttgaataggggaccacagatgcaggcgtcccgagcttgcaaatgcaccggggtagggtggggtggggggttattctgtttgtttttttcaggggtcccgggaggcccaaaggcctccgccgctctcggcttgaacgcgtggaaccgttctcctcgggttcccgcgcgctccaatgggggacccctcggcagcgtgcggtcgtctcgggacccggaaagaggaaaggtggggagccgatggggatgctccgggctcgggagaccgagggggcggacgggcgggaccccgcagccccgggggcctctgggaacccgtcccccctcggccccgccccctccccgggcgccgacctccggggtcacgtgaccaggcccggcggccgctggggccggagggcgcggcgcggggacgcggcggcctggccaggcgaggcgggagccgagcaggccggagcgggccgcgcgccggggagggtcgcgccgcgcccgccccctccccgccacgcccggggcgcacgcgcgctcctctggccgcccctccctccgcgcggggacccctggcgggcggcaggaggacatggccagcgacgccgtgcaggtaggcgcacctgcgtctggagtcccggggcgaccggacggcgccggcggaccccgcccgcgcgctgccgggggagcccccccagcccccggaacgggactcgggtgacgatggcaagggcgggggcctccggagcgcccggcgccccctccctgggccgggactgtggagccagcgaggcccccttctcggcaggtggcgatgtggactgggctggtttgggggcgatcccggaggcaacccctgctacaccctcaaactcggcctctcctggagaactagaaggggcgcggcggaggctctacttcgggtgtctgtggctggctgggcgtcccagtgcctctcgtccgcccccaaactcatccccctccccagggttgggtacccggcaggtgccgctccacctggggcacgtgcctggcgcagtgccctgggaggggaggaggctgctgggcccggcccgtgcccttcccccgcataacaaagctccagccacccccgcctctagacagctttatgatgttccagacgccacccagattggcacctgttggcggaagtacccgagtcactgcattaggtcgggggaatggggacccccactcccacccttgggctgtcaggtggaaccttctcctgggtggggagtgtctcagtcaacaggccagggatgctcccatatatagaatcctacttttttgcatggtggctgggcatggctgggtcacccccaccctgctaacacacacacgtgactggcaccagcctcccgcccagccagattccccttgtgccacctggtggggatcactgacctggactcatcttccccgtctgtgacaagcacggccagggtgactgccaaccttctttggttcaagtgacccaaatctgagaaatgtctgtgcctcagtgtccccattagcacctcaccatccagttcattgtcctgtggttgttgtgtaactgggttctcgtctccttctgcacctgcccccggcccctttgtgtctccccggtaacccccggtccctcccgccttcccagtcctgctgatggcctgccggccttgccgaggagctgggcgtatctggtgttgccgatcacacaaggtcagacctcaaggccgggatgggccggggtccctgcctctacccccggcccagggagggctgtgtaggaatccccgggtgcatgcatgcgcttggcgcatcccacacatgacccagacaggctgtgattcctgcaacgaggctggacccacgccctggtccccccttcccatctcctccccagtctcttccccgctcctggtcatccctctctcatggttgcttgggcctgctgccctgtccctctgtctgtcccaacgtgtgcctgtctgttctgtgtcctgcaaacggatgtcctgtccagattccggaaacgcccaaggcattgaaatctccggatgtgggagtctaggtccctggctgctctggcaagatggggattatgggaggcaggtcctctgggtctgaggtctccgctccatggtgggcagcggaggagcaggggttctccataggacaggccaggccagggccctgagtcctgggtttgccttgctggccctcaggtgacccctgtgccttgggtagaagtgagtcactcaggggaggagaacccaggagcccagcctccctccctctgtgcattacagacctcagctgctggaggtggggctgagggaggccacctctcctctctgcctggacttccccagttgagctggccccgctcttggctgtgtcctccctctgcctgctggggatggggtggggccttctgagcgagggtggtatttggtgagcctgggcttaaattccagcgctgacacttcctcgctgtgtgtcctgggcccagtgccttcgcctctctgagcctcggttctgacctaggaaaaatgggactaagagggtgttcatgggagagagagagaccgagaccttgccagcacttggcaggcagggctgctgtgaagtcgttactggtaagcgtcctggtcagcagctcagggtgtgaatctgtgtccttattgattgatttactgatttatatttatttattttagaggagagagtcttgctctgtcacccaggctggagtacagtggtgcgatcctatgtcaccgcagcctcgatttccaatttccggggctcaagtgatcttcctgcctcagcctcccaagtagctgggacaaaaggcacagaccaacatgcctggctaatttccttttacttttgtagagacagggtctcgctctgttacccaggctggaatgcagtgacgagattcttgttcactgcagcctcaaacacctgatctacaggactacaggcatgcaccaccacacctggctaatttttttttctttatttttttaaattgagactggggtctcactctgtcacccaggctggagtgcagcggcatgatctctgcctcctagactcaagccgttctcccaccccagcctcctgagtagctgggactacaggtgcacaccaccacgcctggctaatttttgtatttttagtagagtcagggtttcgccatgttgcccaggctggtcttgaaatcttgagctcaaagtaacctgcccgcctaggcctcccaaagtgctgggattacaggtgtgagccactgcccccagcctttctttttttcttttccttttttttttgtgatggagtctcgctctgtcgcctaggctagagtgcagtggcttgatctcggcttactgcaaattctgcctcctgggttcacgccattctcctgcctcagcctcccaagtagctgggactacaaacgcccgccaccatgcccggctgatttttttgtgtttttagtagagacagggtttcaccttgttagccaggatggtctagatctcctgacctcgtgatctgcctgcctcggcctcccaaagtggtgggattataggcatgagccaccgcgcctggcctctttttttcttttttgagacaaagcctggctctgttggccaggctggagtgtgatggtgtgatctcggctcactggaacctctgcctcctgggctcaagccagcttcccacctcaggctcccaagtagttgagactgcaggcacatgccatcacacctggctaattcttacattttttgtagagatggggtctcaccgttattgcccaggctggtctcgaactcctgagctcaagcagtcctccggccttggcctcctaaagtgctaggatcacaggcagagagagccaccacacctggccaatacttttttattttttgtagagatttttgtaggtcttgctgtgttgcccagacttatctccaattcctgacctcaagcactgctcctgcctcagcctcccaaagcgctgggattacagacgtgaaccaccacacctggccaaatctatgacccttaaccgtaggcttctcagccttagcactactgacattcagggctgggtcattctttgcagtagaggctgtcctgtgcactgcagggcgttgagtggcatccctggcctcaccctgatagaagtcacctccttacccacagtcaggacaaccaaaaatgtctccggatgttgccgcatgtccccgggtatggggagaaaatctcccctcaatggaaaactgttactggccaggcacagtgcctcacacttgtaatcccagaactttgggaggccgaggctggctgattgcttgaagtcaggagtttgagaccagcctggccaacatgtgaaaccccgtctctactaaaaatacaaaacattagctaggcgcagtggcacgtgcctgtagtcccaactactcaggaggctgaggcaggggaattgcttgaacccggaaggtggagattgcagtgagccgagattgcaccactgcactccagcctaggcgaaagagcaagactctgtctcaaaccaacgaacaaaacatactactgtgacttccttgagcctcagtttcctcacctgtgaagtggggagttcttggcagctgctcaagatttgtagtgagggttgggaagatggtgggagtgatacacttggtctgtggcattcctccctgggggcagctgcgcttgagatcagtcacgagccaaggataacattccttgtctgtgaaatggatgctcccagctgaaggagataaccccagggggccatttcctagccagcatttggaatctgggtgctcttgttttaaatcaaggccctggccacggggcagtgactcacacctgtaatcccagcacttttggaggccgaggcaggaggattacttgaggccaagagttcgagatcagcctgggcaacatagtgagaccccatgtctatgaaaaatacaaaaattagccaggtgtggtggcgtatgcctgtagtcccagctgctcgggaggctgagctgggaggactgtttgagcccaggaggtagacactgcagggagccatgatcacaccactgcactccagcctgggcaacagagtaagaccctgtctcaaaaaaaagaaaaaaagttacatgagatattcaactttactgtaaaatagctttgtgttagacgtttttgcccaactataggcttgggtaagtgttctgagcacatttaaggtaggccagggtgagctatgatgtttggtaggtaagatatattaaatgcatttttgacttatgatatttgcaacttatgatgagcttatcaggaagtaatgccatcataagttgttcttgaatgttactgtgtgcttagcaagtggttttgtaggctgctgatttggggcattctttttttttttttttttttttgagatagagtctcactctgtcgcccaggctggagtgcagtggtgtgatctcgactcactgcaatctccacctcctgggttcaagcgattctcatgcttagcctcccaagcagctgggattacaagcacgtgccaccatgcctggctaattttcatatttttagtagagacggggtttcatcatgttggccaggctggtcttgaactcctgacctcacgtgatctgcctcgctcatcctcccaaagtgctgggattacagatgtgagccaccacgcccggcgtgattttggaaattggaaattctttttttttttgagacggagtttcgctctggcgtgcaatggcacgatcttggctcacctcgacctctgcctcctgggttcaagtgattctgcttcagcctcccaagtagctgggattataggcatgcaccaccaaacccgactaattttgtatttttttttttttttcagtagagacggggtttctccatgttggtcaggctggtctcgacctcccgacctcaggtgatccacccacctcggcctcccaaaatgctgggattataggcgtgaggcaccgtgcccggcctggttttggaaattcttatcccagtcccccagtgctgtcccctaattgtgttggcctgagggaggtgccactgggctggctgggaccccgggcctctcagctatggtcaataacagttggcgactggactgagaggaagcaggaagttgggagggcccgtctgcaggaaaggggcctcacctctgaagaagtggctgttctgaccctgaaggggaagccggggacaaggggtggctgggagagtctggagggacatatgcaggtagtcgcagggctggaggtctgtgggagcatggatgtgctgcaggggcctcggggagcgtgcatatgtgtgtgagcatgtgcacacgcatgagcatgtgggccatgccctctcgggcaggtgggagtgtgtcttgtatgggttctagagggaagctcataagcacttgtatgtgtttgcaaataagtgcatatgtggtaggcatgggaatgggtacactgtgagcccattttccaggcacacacctgcaggtgtagaagtgtgcacctgtgtgtggatctttgtttcatccacacacacaggcatgggagtgtgcacacatgtgagcctgtgttgcaggcacacacctgcagccataactgtgcaaacacaggccaggcgcggtagctcacgtccagtaatcccagcactttgggaggctgaggggggcggatcacctgaggtcaggagttcgagaccagcctggccaacatggtgaaaccctgtctctactaaaaatacaaaaattagctgggcgtggcggcacatgcctgtaatcccagctacttgggaggctgaggcaagagaattgcttgaacctgggaggcggaggttgcagtgagccaagatcacaccagtgcactccagcctgggcaacacaaagggagactctgtctcaaaaaaaaaaaaaaaaaaaaaaaaaggaaagaaaaagaaagcgtgcaaacatttgtgagcctgtgttctgtgcatatccacatatgtatttgaaagttagtgcacactcaagtcagccctcggagcctgcgtcccctcatggatacaccatgagtgtgtgaatgtacaaactgcctgcaccttggacattctctagggacagggagcaaggactgtccctgggtttcatctagaggaacaggaggtcccttagatgccctggagttggccccgcgcgaggggtgctgggagttgacaggaaagaggaagtggcagccgagaggccctggtggggctgaggttcaggaagagggcggggccctcagcccggacccaggatggcggaggccaataacccctcggagcaggagctggaggtggggtccagggtccctgtgggggcaggcagaagggggccccaagtggcacaggccagtagtccttccccgggtacttctcagtttgggaacaaggagaggagatggggcactggcctcagagttctctctctggaggatgagagtatccagtgcccttcggggctcccagattggggagagacagaaggaaggagaccgggctctgttctttagggtcccagttgttgaacataggagaagagcagatgagggtcttcaagaccccatagtttgggggtacagcagagagaagacttggcctgcccttgggataccctagttttgggggtgtagccaaggaaagatgaggcctgccctcgggatgccatagtttcagggtacaagtgagggaagatggggcctgtcctcaggaccctgtagttttaggggtacagcagagagaagacagggcctgcccttgggccctcttagtttcggggagcagcagagaaaagaaggaatcttcccttgggaccctctagtttgggggaggcagcagaagggagacagatcttattcttgagacccccttaatgtgggggacgctgtggtggtgggggtgacaaggccctgctcttgagacctcccagtttggggaggtcaggaagcagtggcaaggcctcgtcaccttccagttttgggagtcagaggaggtagagcaggccctgtcttgggagccccagtccagggcagaggctgggccaggctggctgcatgtggtctgcacctggagttctcctagctccactgaccctgttctgtcctccgcagagtgagcctcgcagctggtccctgctagagcagctgggcctggccggggcagacctggcggcccccggggtacagcagcagctggagctggagcgggagcggctgcggcgggaaatccgcaaggagctgaagctgaaggagggtgctgagaacctgcggcgggccaccactgacctgggccgcagcctgggccccgtagagctgctgctgcggggctcctcgcgccgcctcgacctgctgcaccagcagctgcaggagctgcacgcccacgtggtgcttcccgacccggcggccacccacggtgagctgggatgcctctggggatgcgggactccagggattccactgctcactggctcacccatggtctccagagccaggttaacccatctccacggacccccagggagatgcatgccatgacccccgtagccaccaacacccagagaggtgcatacagccacaccagcacccggtaacactcaagaccgtgcatgctgtcacatgaatacctctagacacagccacgccaacacccaggcaacattcaaggatgtgcatgcagtcacacaaacacctaaaaaaacagccacaccaacacccaggcaacacccaagggtgcacatactgtcacacgaatacctccagacacagccacgccaacaccccaggcaacactcaaggatgtgcacactgtcacacgaatacccagaaactcccacagttacatggatgataaccaaagactgtttatttttgtttttgtttggagacaggatcttgccttgtcacccaggctggagtacagtggtgtgatcaaagctcactatagcctcaatttcctgggctcaaacaatcctcccacctcagccttccaagtagctgggactaaaggcatacaccaccatgcctggctaatttaatttttttttttttttttttttttgtagagaaagggtcttggtatgccgccagggcttggctagaactcctggcttcaagtgatcctcctgctttggcctcccaaatgctgggaatacaggcgtgagccattgcacccagcctgttttttaatttaaaacatttttattggttttaacattttttttctttttgagatggagtcttgctccatcacccaggctggagagcagtggtgcaatctcagctcactgcaacctccacctcccaggttcaagtgattctcctgcctcagcctcctgagtagctgggactataggcttgcaccaccacgcccggctaatgtttgtatttttagtagagatgggatttcaccatgttggccaggctggtctcaaactcctgacctcaactgatccacccacctcaggtgatgtgcctcccagaatgctgggattacaggtgtgagccacctcactcagcagcttgaattttttttggtggggaaggacagagttttgctcttgtcacccaggctgaagtgcaatagcacgatctcggctcactgcaacctccacctcccaggttcaagtgattttcctgctccagcctcccaagtagctgggattataggcatgagccaccacgcctggctaatttttgcatttttagtagagacgggattttgccatgttggccagggtggtatttaactcctgacttcaagcaatccgcctgcctcggcctcccaaagtgctgggattataggtgtgagccactgcgcccggcctcagtcatttctgcacccagggtcccctcaagcatcacaccactctccagagactcatgcagacacatgcatccggatgtgccaacacccggagactcagtcataccaacctggagatctgaactcacagttgtagcaacagtcagagatgtacgcagagcatctcccaacacccacaatctcagacagtcattctaacacatggcgtctcacagagttacactaacacctagggaaacacacactcagccatgccaacaccctgcagctcacagatggcaccactcccacacccataggctcacacaagccatgtacgtagttactcatgggcctctcaaatgcagtggacccagcaccaaggacacactaacacacctgggtgctcgcctgcactcattcatcctgggttctgccccagccccgaggggtttccctgggagggtgggtgggtagactgctgggccctggtgtccccctgcctgcctgtctgctggcccccagctccccctcctccatgccccaggggcaatgcccaggctgggctgaggatgaagcctcccaggcaggccgaggtgaggatgcgtggtgactctctcccacctgtcgcctccagatggcccccagtcccctggtgcgggtggccccacctgctcggccaccaacctgagccgcgtggcgggcctggagaagcagttggccattgagctgaaggtgaagcagggggcggagaacatgatccagacctacagcaatggcagcaccaaggtgaggcagcacgtgcacacacactgtgtacacacaccacacctgtgtgcgtacagtccacccacatgtgcacacctacctgcatgtgtacacatgtgtccctgtgtgcacacgcccactcaaatgtgcacccacacctgcgcatgcacaccccacacgtgcacacccatccgcatgtgtacacacctgtccacgtgtacacacacccactcaagtgtgcacccacacctgtatgtgcacacactcactggcatgtactcccacatctgtacatgcacacacctacctgcgtgcatacacgctcacccacatgtgtacacacccctgcaaatgtgtacacacatatgcatacacccaccacacgtgcacacacctgcatgtgtacacacccttgaacgtgcacacacagctgcacgtgcatgcatacttgcacacacccacatgtgtgtataccagcatgtgtacatacaccccccatgtgcacacacacctgcacatgcacacacacctgcctgtgcacctgcacctgcatacacatttgcaatgcacatgcacatgtacacacccacacgtacacacccacccgtgtatctgcacacacaccgcacatgtatgcacatgcctgtgagcagatcacaggctgggggcatagggtgcagcctacagctgcccccatgggaggctgggagcctttggattggggacatactggctgatgggtgtaacttggtgtcaggactaaggcacaggcagctcatgggggcatatgggaagcatgactatgggtgatgtcagacagacgtggcaaattgtctcccctcctcccacagtcccctgcagagcctcaggcccatccacagtcagggcaacatgccgcctctcactgctgacggtgtgtcctgttacaagcacacacagtcatgtcataccttgacacacacacaccatcataacatctagacacacacacacacatgctgtcataacatctagagacacacagtggtaacaacatctagcaacacatggagaatcccaccacagccacatctggacacacacacacactcttacattcatacccagagactggtgcacagacacacacacatcccccgtcctgccaatcagtcccaggaacacacaggtctctatcaacacccagaaattctgacaccacaagcacaggccaacctacagctagaggattaatgtccagacccacaggctggtgtgcgcatgtccttccacgtgaatgtcacatgggaggacagactgcatggatttttttaatgacactattttatttattttttgagacagagtctcactctgtcgcccaggatggagtgcagtggcgtgatctcggctcactacaacctccgcctcctgggttcaagcgattctcgtgcctcagcatcccaagtacctgggattacaggcgcatgccaccacgtcccgctaatttttgtatttttagtagagatggagtttcaccatattggccaggcgagtctcgaactcctgacctcaggtgatctgcccaccttggcctcccaaagtgctgggattacagatgtgagccaccttgcctggcctaacattattttatttatttaatttatttttatttttattgagacaggggtctgtgttgcccaggctggactcgaactcctgggctcaagcattcctcctgccttggcctcccaaagtgctgggattacggatgtgagccactgcgccccatttatcaattggtggacatttggttgtttccacctttttagcgattgtgagtagttttgctatgaacacctgtgtacaagtatttgaacaccattctatgaaaatttaaaacctagatcaattgtatatcttttacatgtatctgagcgttatacaaaaaaagaataagagtttctcaccccctaagaatttctgccccccgccctgggggtaatactgacccagtgaaaatgaatagagtaggccaggcgcggatcccagcactttgggaggctgaggcaggcggatcacttgaagtcaggagttcaagaccagcatggccaacatggtgaaacccgagctctactaaaaaaatacaaaaattagccgggcgtggtggcacatgcctgtaatcccagctactcgggaggctgaggcaggagaatcgcttgaacctgggaggcagaggttgcagtgagctgagatcacaccactgcactccagcctgggtgacagagcgagattatgtctcaaaaaaaaaaaaaaaaaagctgggcatggtggtgggcgcctgtaatcccagctactcaggaggctgaggactccatggactacatcatgccactgtatccaggaatgcatggaagtacatttatttacttatttatttattttgagacagggtcttgctctgtttcccaggctggagggcagtgatgcaatctcagttcaatgcagcctccaactcctgggcttgagtgatcttcccacctcagccccctgagtagctaggaccacaggtgcacaccaccacgcccagctaatttttgcatttttttgtggagacaaggtcttgccatgttgcccaggctggtctttaactcctgagctcagcagtccacccgcctcagcctcccaaagtgcggggattacaggcatgagccaccgtgcctggcctgcaaatgcatgttgttacatccacatgtgaacactctgccacagtcacctaggacctgcatggtgtggctagaccccaaccacctagccttcctctctcagactgtctctgcctccaggaccggaagctgctgctgacagcccagcagatgttgcaggacagtaagaccaagattgacatcatccgcatgcaactccgccgggcgctgcaggccggccagctggagaaccaggcagccccggatgacacccaaggtgagtcccttgcttccaggcagcttagcctgcatctcgccttgcagggctcagcctccagctccataatgagtccctttctggggcagggaggtgggtcctgtgacccactgtgagacttcaacacattcctgaccctctctgggccagagcttcccattttgtcccatgcaaagtttggattacatcaggggttggtaaattaccaccttcagaccaaatctatccattgtcttttttttgtcaataaagttttattggtacccagccacgcccattcatttactatgtttttgactgcctgactattctgaataatgaccctggcacttggtcacagagagtcagacactcacagtcacactgtgtccacatgtgtcactcacctggacaccaataacacagacacagttccaaggaagttgatagtcacaggtatgttgccttataaacacagtctcggctgggtgcagtggctgacgcctgtaatcccagcactttggaaaccgaggcgggcggatcattcgaggtcaggatttcgagatcagcctggccaacatgatgaaaccctgtctctactaaaaatgcaaaaatcagctgggcgtggtggcacgcagctgtagtcccagctactcaggaggctgaggcaggagaatcacttgaatccgggaggcggaggttgcagtaacccaaggtcgccccactgcactccagcctgggcaacagagtgagactctgtctcaaaaaaacacacacaaaaaaacacacagtctcactgtcacccctagacctgctgccacatggcgctttatcagtcactgggacttttaggaataaagtcatccagtcacccatccttgcgacaacacccagagacaaaggaatgtgtgatcctaccatcacacatagtcactgtgaagtccatgtggatatccacagtacaggcacacaatcacgtgcaccgtcgcactgacacacactgcagggacacactttttttttttgtttttttttttagatggagtctcgctctgttgcccaggctggaatgcagtggcacaatctctgctcactgcaacctctgcctcccgggttcacgccattctcctgcctcagcctcctgagtagctgggactataggcgcccaccaccacacccggctaaattttgtatttttttttgagacggagtcctgctctgtcgcccaggctggagtgcagtggtgtgatctcggctcactgaaagctccgcctcctgggttcatgccattctcctgcctcagcctcccaagtagctgggactacgggcacctgccaccacgcctggctaatttttttgtatttttagtagagacggggtttcaccatgttagccaggatggtctcgatctcctgatctcatgatccgcctgccttggcctcctgaagcgctgggattacagacttgagccaccacgccctaccaattttttgtatttttagtagagacggggtttcaccatgttagccaggatggtctcgatctcctgacctcgtgatccgcctgccttggcctcccaaagtgctgggattacaggcatgagccaccgtgcctggctgacacactttttttgtttagacagggtcttgctctgttgcccaggctggaatgcaatggcgcgatcataactcactgcaggcttgaccttctgggctcaagcaatcctgctgagtagctgggaccataggcgtgtgccaccacacccagcttattaaaagaaattttttttttgtagagactaggtcttgcccaggctggtctcaaactcctgacctcaagtgatcctcctgccttaccctcccaaagtgttgagattataggcgtgagccactatgcctggcctgtgccccttttcttgaccctgtgcttgggcataaatgcatttgtgtctgtgactgtgtttctctgcccctataatggtgtccctgtgcccaagatgacagggccgtgtctgtgtaacagagtctgactcatgacagtgtctctatgtggcagggtgactacatctttgtgacagagtatgtgttcctctggtgatagtgtgcctacgctggtgacaaagtggtaatgccatgtgtccctgtgggcgacagtgtgacagtgtcagtgcgacagtgcctgccttactctccttgggccgccataacaaagtcccataggctgagtggcttaaacaacagacatttatgtttttcacagttccagagactggcagtcccagatcagggtaccagcatggtcggttcctggtgagggcgctcttcctggcttacagatggcttccttcttactgctccctcacagggagaaagagccttagtgtctcttcctcttcttatttttcattattagttttttgagacagggtcttggtctgtcacccaggctggagtgcagtggcgtgatcacagctcactgcagcctcgactttctgggctcaagtgatcctcctcgttcagccttctaatagctgggactacaggcacacgccaccatgcctcgctaatttattttttatttttagtagagacaaggtctctctatggtgcccaggctggtctcaaactcctggcctcaggtgatcctcctgcctcagcctcctaaagtgctgggattacaggcgtggaccactgcacccagcttcttcctcctccaataagcgcgctaatcgcatcatgatggccctccctccatgacctcctctaaccctaattacctcccaaaggcacttggagaagtccaagtgccatcccactggggattaggggttcaacataggaatttggtaggagacaaacattgagtctcttaacagtgtctttgtgactgacaccgtctgtgtaaatgtagtatgctgtggttgtccagatgtccatgagtgtcaccatgcctggttgactgtgtaacctggtgactgttcattggggaatgaggtgtgtcaacacgggtatgacagtattattatttttttttaatgacttagagtctcactctgtcacccaggctggagagcaatggcgcaatcttggcttactgcaaccaccgcctccggggttcaagtgattctcctgcctcagcctcctcagtagctgggattacaggcatgcgtcactgtgcccagctaatttttgtatttttagtagagagggtttcaccatgttggtcaggctggtctcaaactcctgacctcaggtaatccacccgccttggcctccgaaagtgctgagattacaggcctgagccgccatgcttggcctatgatttagatgttcctgtctgtttgggtgacagcccctgggtgacagtgtctgaatctagataatgtggctgtccctgggggccacaatgtgcctgcgtctgtccctgtgcaaatcactggaggtgaagagggaccgtgacaatgtgtgtgtcggtaagcgtggggtgacagtgtgcctgtgtgtcattgctcagactgtcccctgtaacagggtaactttttccctaggactggccctgtgagtgatggtgtttggataaaagagtctgggtggaagtgtggctgcctgcaggtgacagtgcgacagtgtcactgtgcctgccccttggatgaagcgtgatgcatcttcatgatggtttgtctgtggcccgtgcctgttcctgcgaatggctgtgtctgcgactaggttggtggggcgctgcaggctagcctcactgccctgtattccacgctcacagggagtcctgacctgggggctgtggagctgcgcatcgaagagctgcggcaccacttccgagtggagcacgcggtggccgagggtgccaagaacgtactgcgcctgctcagcgctgccaaggccccggaccgcaaggcagtcagcgaggtgaggggcggagctttcattagaggcggggcttcagcaaggggcggtgcttcagcaagcggcggggagttcaccaggaacacccacggtgaggggtggagcctcaaagggggtgggaccttcataaggggtggggcctcagccagggtagactactgtgaggggcagggcatcaggcaggaacagtgcaactgtgaggggcggggcctcagcgagggggcatggtttcaggcaggaatggccctcggtgaggggaggggcctctccaaggggcggggcctggttttcccagaggtgggaccaagttggtttgaggtttagccctctagggaggagctcagtgtgagactcagcctgggggtggggcctaggcctgcacttgggaaggggcaagcctggtcccgcccccagcccccacacttcccaccacaggcccaggagaaattaacagaatccaaccagaagctggggctgctgcgggaggctctggagcggagacttggggagctgcccgccgaccaccccaaggggcggctgctgcgagaagagctcgctgcggcctcctccgctgccttcagcacccgcctggccgggccctttcccgccacgcactacagcaccctgtgcaagcccgcgccgctcacaggtgggtctgagaccctaccccacccctgcagccctgggcctccgactcctctcatttccccattcctgtgacccccgacttcaatctccgctctccccaaccctggactcccattccaccactgtctcctcccctcctttgccctctgattctgggctcttgcccaccccccccacacctcagtttctccatctctcttcacctggcccagtatttttctcccagcccttgttccccagccccacctcggcctcacaacgctcagccatgagcctcctacccgcctgctgcagaccagccagccccaccttccacagacccctcagccatctacccctccagaccagccccaccgtagacccctagcccatcttagacctcagattgtccaccgagtcctcccctagaacccctagtcctaccctgttcctgcttgcctgggcctacggcctgtaccctgagcctacggcctgtaccctgagcctctcttctgcccctaaactcccgcatctgagcccctcctggaaggactgcttctctcatattctcctatcccagcacggacatcccggcctcatgccccatgctccattctggttgtccctcactggctcccacttgtaccatggctgcgtctggatgtgtcccctccccgctgtggtcccctccgctcagcctgccccagaagtggccccctgctgagctttcccctcctgcagggaccctggaggtacgagtggtgggctgcagagacctcccagagaccatcccgtggaaccctaccccctcaatggggggacctgggaccccagacagccgcccccccttcctgagccgcccagcccggggcctttacagccgaagcggaagcctcagtggccggagcagcctcaaagcagaagccgagaacaccagtgagtgggcatcgtgggccctgagaaacgaggtggcattggggacctggaatgccccatatttgtaaacctttaaaaaataagccaggggtcgggtgtggtggctcacacatgtaatcccagcactttgggaagccaaggtggacggatcacttgaggtcaggaatttgagaccagcctggccaacatggtgaaacactgtctctacttaaaaatacaacttagctgggcatggtggtgcacacctgtaatcccagctgtttgggaggcttaggcaggagaattacttgaacccgggaggtggaaattgcagtgagccatgatcacgccattgccctccagcctgggtgacagagtgagactttgcctcaaaagagaacgaaaacaacaacaaaaacaaaaaaacaggccaggtgcagcagctcatgcctgtaatcccagcactttgggaggctgagacaggaggatcacttgaggccaggagtttgagaccagcctgggcaacatagcaagaccctgtctctacaaaaaataaaatgtaaaaattagccagatgtggtggcccacacctgtagtcctagctgttctagaggtgggaggatcacttgagcccagtgagctatcattgagccatttcactctagcctagatgacagagagaccctgtctctaaattaaaaaaaaagaaaaaaaacttcaagtttatttagattaaaaaaaaggctgggcgtggtggctcacgcctgtaatcccagcacttggggaggccgaggcgggtggatcacgaggtcaggagttcaagaccagcctggccagcatggtgaaaccccatctctacaaaaaatacaaaaaaattagccaggcgtggcggcgcgtgcctgtaatcccagctactcgggaggctgaggcagagaattgcttgaacccaggaggcggaggttgcagtgagccgcgattgtgccaccgtactccagcctgtgcaacagagcaagactccatctcaaaataataataataataataaataaataaaacaaatttaaaaagaaaggaaaaccaaacaagaaaccaatatatcatattcattaggatgactaatactattttaaaaacccaacaaaacaaacagaaaataagtgttggtgaggatgtggagagaaatcagaacctttgtgcactgttggtgggaatgtaaaatggtgcagccctatggaaaatatattggcatggccgggtgcagtggctcacacctgtaatcccagcactttgggaggctgagggggccagatcacctgaggtcaggagttcgagaccagcctggctatcatggcaaaaccccgtctctactaaaaatacaaaaattagctgggcatggtggtgtgtgtctgtaatcccagctactcagaaggctgaggcaggagaatcgcttgaacccaggaggcagaagttgcagtgagcttagatcgagccactgcactccagcctgggcaacagagcgagactctgtctgaaagaaagagagagagagggagggagggagggaggaaggaatattggcagttcctgaaacaagtaaaaacagagtaagcagtccaggcgcaatggctcacacctgtaattccaccactttgggaggtcaaggtaggtggatcacctgaggtcagaagttcaagaccagcctggccatcatggtgaaaccccatttctactaaaaatacaaaagttaaccgggcttggtggtggtgcacgcctgtagtcccagctactctggaggctgaggcaggagaattgcttgaatccgggaggcagaggttggagtgagcagagatcatgctactgcactccagcctgggtgacagaatgagactccatctcaaaacaaacaaacaaacaaaaaaacaagagtaaccatatgatccaaagctacttctgggcatatccccaaaagaattaaaaacagggcctcggacattccataatgcatacatatttcaaaacaacatgttgtgcatgataaatatatataatttttatttgtcagttttaaaaatagtgatagaaaaatatttaaaaaaaaaaaaaagggtctcagagatatgtatacctgtgttcatagcagcattatgaaagccaaaaatggaagcaacccagatccaccaatagatgaatgggtaaacaaaacgtgggccagccatgcaatggaacattgctcagatttaaaaaggaaagaaatcctgccaggcgcagtggctcatgcctgtaatcccagcactttgggaggccgaggcaggtggatcacttgaggtcaggggttcgagaccagcctggccaacatggtgaaaccccatctctattaaaaatacaaaaattagccgggtgtggtggcacatgcctgtaatcccagctactcaggaggctgaggtaggaaaaccgcttgagcccaggaggcaggcgttgcagtcagccaagatcatgccaccgcactcctgcctgggtgacagagtgaaacactgtctcaaaaaaaaaaaaaaaaaaaaggaaaggaatcctgtcttatcctgcaacacggatgaatcttgaggacattagtctaagtgaaataagccagtccccaaaagacaaatattgtatgattccagttatatgaggttcctagagtagttagattcatagagacagaaagtagaatgatggatgccagggagtagagggagggggaatggggagtttattatttaatgtggacagagtttcagttttgtaaggtgaaagttctggagatggatggtggtaatggttgcacagcaatgtgaatgtacttaatgccactgaactggatggacactttaaagtgattatgatggtaaattttatgttacatgtattttaccataattttttttttcttgagacagattctcctctgctgcccaggctggagtgcagtggcaccgtctcagctcactgcaacctctgcctcctcggtttgagcgattctcttgcctcagccaacccaaatagctggtgggattacaggcgtgcgccaccacacccggctaatttttgtatttttatggagatggggtttcaccatgttggccataatttttttaaaagaaaatttgattcgtaatctcatggcaaaaaaggaaaaagaaagaaaattaatacgtatgtacaaaaaaaaaagggagtgtggagaagagtaacaggagagcagacacccatattaccaccacctgcgttaggaaatagaatatggcagccaggtgccacggctcatgcctggaatcccagcattttggtatttgtaggaggatcacttgaacccaggagttcaagaccagcctgggcaacatagcaagaccttgtctttacaaataatttaaaaattggggcatatggccaggtgtggtggctcacgcctgtaatcccagcactttgggaggccgaagcgggtggatcacaaggtcaggagatcgagaccatcctggctaacacagtgaaaccccaactctactaaaaatacaaacaattagccaggcgtggtggtgggcgcctgtagtcccagctactcgggaggctgaggcaggagagtggcatgaacctgggaggcagagcttgcagtgagccgagatcgcgccactgcactccagcctgggtgacagagcaagactctgtctcaaaaaaaaaaaaaattgggggtacatgtcatcaggccctcctgaatctgtgtcacagaaaaaaaaactaaagggaaaaaaagagaagacaagccaaccaaaaattaaccaggcgtgggcatggtggcttgtgcctgcggtcccagctacttgggaggctgaagtgggaggattgcttgagcgcaggaggtcaaggctacagtgagctgtgattgcaccactgcattccagcctgggcaactgagcgagaccccatcttaaaaaaaaaaaaaaaggaaaagaaatagaatatttccagctctccagaagccccctcttgtctcctccacaattccatctccttcctctgccatagaggtggctactctcccgacttttatcatttccttgctataatttgtagttgtagaaccccatgtttgcatccccaaaaacttttgtttaattttgcctggtattagaactttatattgacaggctcatacagactattctatcacatggcttctttcattcaacattgtttaggggctaggcatagtggctcatgcctgtaatcccagcactttgagaggccgaggtggagggattgcttgagccaaggaatttgaacccagcctgggcaacatggtgaaaccccaccctacaaaaaaatgcaaaaaacaaaaccaaactaaaaaaagcattgttttggtagactcatccattttgttgtgacaagctatagttaattcatatttattcctgtttagtaatccattatgttagactgagccatatcgaattgcctctttctgaaagcaaaaaaatagttaaatatcagcaatttcgtacttcagctactaagatggtatagcagttttaaaatattaattctcctgttaatggactgtgggatgcctctattttggactgttacatacactttatataaatgcatctcctgatgtatacccacatgcatttggctagggtaaatcctcaggagtgcctgggcgcggtggctcacgcctgtaatcccagcactttgagaagccaagaccagtgatcacttgaggtcaggagttcaagaccatcctggccaacgtggcaaaaccccatctctactaaaaacacaaaaattagctgggcatggtggtgtgcgcctgtagtctgagctactttggaagctgaggcacgagaattgtttgaacccagaaggtggaagttgcagtgagccgagattgtgccactgcactccatcctgggtgacagagagagactctggctcaaaaaataaatgaataaataaatccttaggagtatgtggctgggacttccatgtagaataaaattgaatttggatccctgcctcacatcacaccatgtaaaaaaatcaactggattaaaggcttcaatgtcaaatgcaaaactttacagtgggagaaaagttatggaggggaggattcattttaaaaagatagcagacagctaggcctggtggctcatgcctgtaatcccagatacttgggaggctgaggcaggagaatatcacttgaggccaggagtttgagaccagcctgggcaacataacaagactcatctctactgaaaaaaaaaaaaaaaaagaaaaagataatagacatgcccctttctgccaggattttctttctttttcttttttttttttctttttttttttttttgagatggagcttcactcttgttgcccaggctggagtgcagtggcgtgatctcggctcactgcaacctctgcctcctgggttcaagggattctcctgcctcagcctcccgagtaactgggattacaggcatgtgcaaccacgcctgggtaattttttatttttagtagacatggggtttcaccatgttggtcaggctggtctcaaacttctgacctcaggtgatccacctgcctcagcctccgaaagtgttgagattacaggcatgagccactgtgcctggccgtttttattttctcttctcttctcttctctcttttcgaccgagtcttgctgtgtcacgcaggctggagcgcagtagcacgatcttggctcactacaacctctgcctcctgggttcaagtgattctccttcctcagcctcccgagtagctggcattacaggcgcgtgccaccacgcccagctaattttttgtatttttagtagagacggggtttcgctatgatggccaggctggtcttgaactcctggcctcaagtgatcgcctgcctcaacctcctaaagtgccgggattacaggcatgagcaaccttgtctggctactgccagcattttctgactgggccctctctcccatttcaggtgaagtcagcactgtgcttaagctggataacacagtggtggggcagacgtcttggaagccatgtggccccaatgcctgggaccagagcttcactctggagctggaaagggtgagctgcgttggaggacagcagggcctagaggaggaggggttccatgcctctggcaccctgagtgatggccctcttcctctccctccaggcacgggaactggagttggctgtgttctggcgggaccagcggggcctgtgtgccctcaaattcctgaagttggaggatttcttggacaatgagaggcatgaggtgcagctggacatggaaccccagggctgcctggtggctgaggtatagcccacacctgaccctgagaaaatgcttcttctccctcactgccccattcccagtttcctagaaggggaaaatatgttttaggtctggctcttccagaaggggaagataagttttaagtcaggcttttctagaagaggaaaatagattttagatccagctcttctagaaacggaagatatgttttaactctgccttttctagaaggagaagatacgttttaggtcaggctcttccagaaggggaagagacgttttaggtctgcttttttctagaagggaaagatatgttttagatcaggctcttctagaaagggaagataggcttttgatctgcctgttctaggctgggcgtggtggctcatgcctgtaatcccagcacttcggaaggctgaggcaggaggatcacctgaggtcagggagaccagcctgggcaacatggtaaaaccgcgtctcaactaaaagtacaaaattagctgggcgtcgtggcacatgcctttagtcccagctacttgggaggctgagacaggagaatcgcttgaacccaggaggcggaggctgcagtgagctgagatcccaccactgcactccagcctgggcgacagagtgagactctgtcgcccaggagtctcacaaaaaaaaaaaagatctgcttgttctagaaggggaagatacattttagatcaggctcttttagaagcataagatatgttttagatatggtttctcttaatacagaaagatagttttagatcaggctctttcagaagtggcaggtatgttttagacccgtgtattctagaaggggaagatacattttagatctgtctctgaaccttgatagaaaagtacaccttggccaggtgtggtggctcacgcctgtaatcccagcactttgggaggctgaggcaggtggatcacttgaggccaggagttccagactagcctggccaacatggtgaaaccccatctctattaaaaatacaaaaattagctgggcatgatagtgggtacctgtaatcccagctacttgggaggctgaggcaggagaattgcttgaacccaggagacagaggttgcagtgagctgagatcacgccattgcactccagcctgggcaacagagtgagactcttgtctcaaaaaaaaaaaaaaaagaagaagaagaagaagaaaagcacttctaattagccacatcagtgataggaccttagctgggattggttttgttctgaggcaagatacttaaaaaaaaaaaaaaagaagaagaagaagctgatttccaaatttagaaatgtttaaagaaaaaaggaaataaattataaaatttcttccaaccaggaaagagatacaaaacctggcaacatatcgtggtgattgctaccagagccacagtcaagagaaagtgattccttccacagctgtgtgagggtgaaggtctgaattgaggtggcctacccttggcactgttgacatctggggccacatcatcctctgtggtggggctgtcctgcatactagaggatgtagcacctctccccactgcttacaggatgtcagtagcaccacctccccctgagttttgacagcccagaggtctccagacactgtcaagtgctccctggccgggaacccctggtctaaatgacatttctagctgagttctcatagtataagccaggctctgtagcgagtactttggcgacgtgaactcattaattctcacaaccaaccaacaaaagagggactgttattactcaaatttgacagaggaggaaactggggcacagagaaggggcacttgacccctcatttagccaaattatcctaaaaaactcttttaatcttccgctaacctatatgtgtaccccattttacatatatatatgatagattacctatatatgtatacacacacatattatctattatttacccacctacgtgtccatccatccattttgtctgtctatgcattcatccatccatcttttttttttttttttttttttgagatggagtctcgctgtctcccaggctggagtgcagtggtgcgatcttggctcactgcaacctctgcttcccgggttcatgccattctcctgcctcagcctcccgagtagctgggactacaggcacccgctaccacgcccggataattttttgtatttttagtagagacggggtttcacccaccgtgttagccaggatggtctccatctcctgacctcgtgatctgcccgccttggcctcccaaagtgctgggattaccggcgtgagccaccgcgcccggcccagccatcttatcaatgcatcctctatccattgatagatacacctatattatctgtcttatctatgtatccatctatattaggtatctatatcatctatttatctaatccatctatccatttatctatctctatctatatattatctatcaaccaatctatttttccatgcatccgtctctattatctgtcagtcatcttatccatcaatcttatgtatgcatcatccatccatctatccatccctgtatatttctctgtatatatatctacccattcctctctctatctctatctatccctctctatatctatctgtgcctctgtttttctctatatagctatatctatctatccatccatctatattatctatcaactaatctatctttccgtctacccatctgtctatattatctatccatctatattatctatctatcatcttatccatccatccatttatcttatctatgctcatccctccatccatccatctctgtatattcctctatctctatttatatccacccattcctgtctctgtctctatctatccctctctgtatctatctgtgtctctctctctttttctctcgatagctgtatctatctatccatccatctatccatgcatccttctctttctatgaatccctttctctatcagtccctctctctttctctatctgtaactacccttccgtccatgcccctctctatctacctgcgtctatatctgtctctttctgtgtctatttatccatctctctatatccatatccctaagcagaggttctcccctggtctgaccatcaagcaccagtgaaagaaaggggcggggccaggcacagtggctcacacctgtaatcccagcactttgggaggctgaggcgggcagatcactaagtcaggagttcgagactagcctggtcaacatggtgaaaccccgtctctactgaaaatagaaaaattagccgggtgtggtagcaggcgcctgtaatcccagctacgcgggaggctgaggcaggagaatcagttgaacctgggagatgaaggttgcagtgagccgagatcgcatcattgcactccagcctgggcaacaacagcgaaactctgtctcaaaaaaaaaaaaaagaaagaaagaaaggggcgtggagaagagctgactccagatggcagaggtttaaaattgttctcccattcagaacacagcccaaaccaaatggaaagtgatggtgggtggcctgggggacacattctaaagcgtttctccttgccttcaaggtctctctgtggcattctattttgtttttatgcctatacagaagcattcttccatagaacttttctgcagctctggccgggcgctgtggctcacgcctgtaatcccaatacttcgggaggctgaggcggatggatcatttgaggtcaggagtttgagaccagcctggccaacatggtgaaaccctgtctttactaaaaatacaaaaattcggctgggtgcggtggctcacgcctgtcatcccagcactttgggagggtaggcaggcagatcacctgaggtcaggagttcaagaccagcctggccaacgtggaaaaacctagtctctactaaaaatacaaaaatcagccaggtgtggtggcgcacgcctgtaatcccagttacttgggaggctgaggcaggagaatcacttgaacctgggaggcggaggttgtagtgagccaagatcgcaccactgtactccagcctgggcaacagagtgagactgtgtctcaaaaaaaaaaaaaaagaaattagccgggcttggtggtgggtgcctgtaatcccagctgctcgggagactgaggcaggagaatctctagagcctgggaggtggaggttgtggtgagcccagattgcgccactgcactccagcctgggcaacagagtctcaaagaaaaaaggaactttctgcagctctgttgtcgatgcacccacagtagctgagttctgttgtagatggaaatgttctctatctgaagtgtgaccagtgtgaccagggaaccaaagttttaatttcgctgacattttcactaatttaaatcgccacatgtgacaaccataccagacactgcagttctgtgacttcagcaccttctagaagttgtattggagttgggagaattcaacttgacaggtggcttccatagatgggtgggcaccagcattgcctgggggcttgttgaaatactgagtgctttagggccgggcacggtggctcgcgcctgtaatcccagcactttgggaggccaaagtgggcagatcgcttgagcccaggagttcaggaccagcctggccaacatggtgaaactccgtctctacaaaaatacaacaatttgccaggcatgggggtgcgtgcctgtagtcccagctactcaggaggctgaggtgggaggatctcttgagcccgggaggtggaggctgcagtgagccgagatcggactactcatatgtgcatatatatatgtgtgtatatatatatatgtgtgtgtgtatatatatatatatatagagagagagagagagcatgcgcgcgcttcctccactccatgtttctggctcagtaggtcaaacctgcgtttctagaaagttcccaggtgttgctgctactgcaggtctggggtctgggagcacatgtggggaatggggtgtgggatggcgtggcgtccgtttgcagtcgctgtctgtcagtcttgttgggtcagatgctctccccacctctagaaagggacccggttgtttgcttcttgcttttccaagacgtcccttcaggaggggagccatgggttgcaccgatgacctcttcattgtcacctggtactcgggttgaatctgatgccacgtgaccagaaccccacttgggcgcgcacacctgtgctcccaggggcttccttaccaagctgtctgcctgcaggtgggcagagggtcctcacattttggtcccttcccccaggtcaccttccgcaaccctgtcattgagaggattcctcggctccgacggcagaagaaaattttctccaagcagcaaggtgagagggtgctccaggcttcctgggggagaggccaggggtcctgggagtgtcatggagggtgacgcctgccccgtccccccagggaaggcgttccagcgtgctaggcagatgaacatcgatgtcgccacgtgggtgcggctgctccggaggctcatccccaatgccacgggcacaggcacctttagccctggggcttctccaggatccgaggcccggaccacggggtaaggaaggagggccccatggtcccggctgccccttgaagcctgcgagggtcctgggtcccagacacaccctcctctcgtctgctgcagtgacatatcggtggagaagctgaacctcggcactgactcggacagctcacctcagaagagctcgcgggatcctccttccagcccatcgagcctggtgagggtccccccttctatccccgtaggcctggcctgggcagcgtcaggggtcctgctccaggctcagagaccactaggaacttccctggagccacgcagcatgtctgtggcagaaccagggcccagatctctatgctggttaaaacgtgtgcccagatccccatcctggttaaaaaactgctcatgcctataatctcagcacttctgggaggctgacatgggaggattgctggagcccaggagtttgagaccagcctgggcaacacagtgagccactgtgagccatgatcctgccactgcactccagcctgggcaacatagcgaaatactatctcaaaaaacaaaacaggctgggcacagtggctcacacctggaatcccagcactttgggaggctgaggcgggtggatcacttgaggccaggagttcaagaccagcctggccaacacaatgaaaccccgtctctaataaaaatacaagaattagccgggtacggtggtgggcacctgtaatcccagctacccgggcaactggggcaggaggatcagttgaacctgagaggcggaggttgcagtaagccaagatcataccaattgcgctccagcctgggcgacagagcgactccatctcaaaaaataaaaataaataaaactgtgagctcagcggctggaccccctgggttcccacccctgccgtgccacctcttggctctgcgcttcacctctgtgcctcagtgtaccactttgcaaaacgagcatatttaaaactcatgtcaatgatagaatgatcgagagagtgctgttctctaggcagaggttaccgcaagctgggagccacaaggggacctgccgggtgatggaaatgttccttatcttgatctcggtcagaggtcagcacgcgttttccagaaagggccagagagtcaatatttttggctttgtgggctagacagtccctgtctgctttgtagtttgaaagcagccacagacgatatatgtacactgtaagcgtgtctctattccagtaaaaccttattggtagtacacgcggaagtttgaacattgtagaactttcatgggcaatgaaatattattcctttttttgtttttttttattcccccaacgatttaaaaatgtaaaaatcagtttacctgtggtcccagctacttgggaggccgaggcaggaggatgacttgagcccaggagttggagtctggcctgaacaacatggcaaaactccatctcttttttttttttttttgagatggagtctcactctgttgcccaggctggagtgcagtggcgtgatctaggctcactgcaacctctgcctcccaggttcaagggattctcctgcctcaaccacccgagtagctgggactacaggtgtgtgcccaccacacccagctaatttttgtatttttaatagagacggggtttcacctcgttggccaggctggtcttgaactcctgacctcagatgatctgcccacctcagcctcccaaagtgctgggattataggtgtgagtcaccatgcccggccactgcatctcttaaaaaaaaaaaaaatagtgaaagccattcttagctcttacaaactataaaaacaggctggcccaccagccagcatttgccaactcctaggctggctgatggtttcctgggtggatgcatatgtaacctgttcctcttgcccacctcactgaatgcattttatttatttatttattttgagacagagtctcactctgtcgcccagaatgggcgttggaatgcagtggcgtgatctcagctcactccaatctccgcctctcaggttcaaagatgcccatgcctcagcctccctaatagctgggactacaggcatgtgccatcatgcccaactaatttttggttttagtagagatggggtttcaccatgttggccaggctggtcttgaactcctgacctcaagtgttctcccctctgcagcctcccaaattgctgagatacaggtatgagctactgcacccagcctgaatgcattttatcttttatcttttttttttgaaacggggtctcgctctgccatccagggtggagtgcagtggcgcagtcatggctcgctgcagcctcgacctcctgagctcaggtgatcctctcacttcagcctcccaagtaactgggactacaggcgtgcaccaccacacctggctaattttttatagatctaattttttagaaagtagaagtaatgggttgggcatggtggctcacgcctgtaatcccagcactttggagtcaagagatcaagactatcctggctaacatggtgaaatcccatctctactaaaaatacaaaaattagccgggcgtggtggcgcacgcctgtaatcccagctacttgggaggctgaggcaggagaattgctggaatctgggaggcggaggttgcagtgagctgagatcacaccactgtaccccagcctgggcgacagagtgagactcagtctcaaaaataaaaaaaataataataaaaaatggacattgtcaagccaggcatgatggcttgcacttgtagtcccagctactcaggaagctgaacgaagaagatcgcttgaggccagaagtttgagaccagcctgaggaacagaacaagaccccatctctacaaaaattaggccgggcgcggtggctgacgcctgtaatcccagcactttgggaggctgaggcaggtggatcacctcaggtcgggagttgaagaccaccctgaccaacatggagaaaccccatctctactaaaaatataaaaaattagccgggcgtagtggtgcatgcctgtaatcccagctgtttgggaggctgaggtaggagaatcacttgaatccgggaggcggaggttgcagtgagcgaagatcacaccattgtactccagcctgggcaacaagagtgaaactccatctcaaaaaaaaaaaaaatgagctggacgtggtggtgcatgcctttagtcccagctactcaggaggcggaggtagagttggaggctgcactgagctatgactgcgcccctgcactccatcctggaagacagagcaagaccctgtctctaaaaaaaaaaattcaggttgggcatggtggctcacgcctgtaatcctggcactttgggaggccgaggcgggtggatcacctgagatcaggagttccagaccagcctggccaacatggtgaaaccccgtctctactaaaaatacaaaaattagccagccatggtggtgcaggcgtgtggctggaggagagtgagtgaggggctgcgtgggaggagaggtgaggacagagaggtcgggggcagatcttgcagggcctcggaggctgctgtggttatgagggcatctctgactccccttactctggcctcctctctccgccacagagctcccccatccaggaatccactgctcccgagctgccttcggagacccaggagaccccaggccccgccctgtgcaggtgacaccactccctggccccctgtccaccacccctgcccgctgtccttgttctcaccagtggcctctctccacagccctctgaggaagtcacctctgaccctcgaagatttcaagttcctggcggtgctgggccggggtcattttgggaaggtgaggtggagggcagggaattgggagaccccccaggtccctggctggccgctaaaaccacccctgcccactgtggttccaggtgctcctctccgaattccggcccagtggggagctgttcgccatcaaggctctgaagaaaggggacattgtggcccgagacgaggtggagaggtggggacctgccgtggtcctctggggacctctttcttctcttttgggaaatgacagagcagttctctccttggagctacagggagagtgactcatagtagtcactaacgccaggcacagtggctcttacctgtaatcccagcactctgggaggccgaggcaggtggatcacttgggctcagaatttcaagaccaggctgggcaacatggtgacacccccatctttacaaaaaatacaaaataattagctgggtgtggtggcacatgcttgtagccccagctactcatgaggctgagataggaggatcgcctgagcccagtaggtcaaggttgcagtgagctgagatcgcgccactgcactccagcctgggcaacacagtgagaccctgtctcaaaacaaaaagtcactaatacctactagcctaataccaagataataatagctcttaggaaagttattcatttgttcctccatgtagccctataagataaatactgatggcacagagaggttcagcaatttacccaaggtcacacagccagtaagcagcaggtccaggattcaaagctagagactcaggctctgaagcctgtgccctttgtggtgccaccatactgcctctgctttagggtcaggttcctgggttcaaatctcaattctgcagcatgggcttggagatcctggggaggtcacttctcccttcagaacctcagcttcttggctgggcatggtggctcacgcctgtaatcccagcactttgggaggctgaggtgggcagatcatctgaggtcaggacatcgagaccagtgtggccaacatggtgaaaccccgtctctactaaaaatacaaaaatcagccaggcatggtggcgggtgcctgtagtcccacctacttgggaggctgaggcaggagtatcgcttgaacccaggaggcggaggttgcagtgagccaagatcgcaccactgcactccagcctgactctgtctcaaaaaaaaaaaaaaaaaaaaaaaagaacccctcttgttgtggagaagcagaatgctattgccttccacacatggttgtcaggtgctctctacacagtgcctaacccctctaaacattcggtacaggcactgagattgtgcctggtcttcccagcatccttttgataatcaggaacccaactgagaaagactgaaacaagtaaagaaatttattggtctggatctgaaaagtccaggagtgtgctaccttcaggcatggctgtatccaggtgctgagatgacgtttctcagttctgcttccctctgtatgggctttggttgccatctgggagtctggagtaagtggcggccatggtctctgacttctatcccccacccctccccagcctgatgtgtgagaagcggatattggcggcagtgaccagtgcgggacaccccttcctggtgaacctcttcggctgtttccagacaccggagcacgtgtgcttcgtgatggagtactcggccggtggggacctgatgctgcacatccacagcgacgtgttctctgagccccgtgccatgtgagcctggaccccagcccgggcccctgcctcccctacagcatctgacacttagtccccccgagaggctggcagcctgcttctcacccctccaccctcaggccttgcttccctcagcctcccagagctttggggagactggggggcttttgaggatgtggaagccaggcttatgtgaccctccctccttgcagggtggccccacccctctcagcagcctctctctctctgcagcttttattccgcctgcgtggtgctgggcctacagtttcttcacgaacacaagatcgtctacaggtgtgtgcgtgtgtgcatgcatgtgcacactgcccgttgtggggacaggacccagacccccgctcatccctctttccacccctccaacccccaacagggacctgaagttggacaatttgctcctggacaccgagggctacgtcaagatcgcagactttggcctctgcaaggagggtgaggggctggcctctggattagacaaaggagggggaaggaatggggtccctaaccctattcggggtgccccccaccctgaccctgggacagggctggctgtgtggacaaccccacattgggctgagtgactcctctggcccccataacctcacatggccttgctgtccccagggatgggctatggggaccggaccagcacattctgtgggaccccggagttcctggcccctgaggtgctgacggacacgtcgtacacgcgagctgtggactggtggggactgggtgtgctgctctacgagatgctggttggcgaggtgagaccccgcccctgtgtgtctcggatctcattggaacctgcgcgtgcccagggtgggatccaagtctgcctccaccatgtgttgtgtgattgagggctgctggctctgcttccctggcctcagtttccacatctataaaatggggcatttccctgcccaagtaagccagcacccaagagctgcagcagagtgtggggctcaggccgggctgggtttggagcagccagaggaggggcctcgttcaccccgggcctccctctccccagtccccattcccaggggatgatgaggaggaggtcttcgacagcatcgtcaacgacgaggttcgctacccccgcttcctgtcggccgaagccatcggcatcatgagaagggtgaggacccccgacgtggggcgggcctggggaggggcagtggggcccaggaggggacagatcctgacacagtgctccttcctccaagctgcttcggaggaacccagagcggaggctgggatctagcgagagagatgcagaagatgtgaagaaacagcccttcttcagggtgagattccccacaaggacctcagtgaccccggccctcccccagggccgattcatcaccccacagcagacggcccccatgcctagccgctttgcctcaagggcctcgttgcgcctcaagggcctcgttgcacctccagggcaacatcgtcacctcctttgacacccccatttccctcctccacttttgttccccccaaggaccctcctaatcccacatctccacttttcccttttttttttttttttagccagggtctcgctctgtcgcccaggctggagtgcagtggctcaatctcggctcactgcaacctccgcctcccaggttcatgcagttctcctgcctcagcctcccgagtacctgggattacaggcgtgcaccactccaccacaccaggctaatttttgtatttttagtagagacggggtttcgccatgttggccaggctggtcctgaactcctggcctcaagtgatcctcccgcctcggcctcccgaagtgctgggattacaggcctgagccaccacgccgggcctccacttttcctaatccggcttctccaccaggctctcgcaggtgatccctcctgagccccagtccccccaccccacttgtcctctgtatgctcactcctctccgtggtccccgagccccaggactggtccccactgcagcacgccccctcctcagcctccaggctgaccctcccctccgcttccctcccctgcagactctgggctgggaagccctgttggcccggcgcctgccaccgccctttgtgcccacgctgtccggccgcaccgacgtcagcaacttcgacgaggagttcaccggggaggcccccacactgagcccgccccgcgacgcgcggcccctcacagccgcggagcaggcagccttcctggacttcgacttcgtggccgggggctgctagccccctcccctgcccctgcccctgcccctgcccgagagctcttagtttttaaaaaggcctttgggatttgccggatccttgcatcctccgtgtcttcttgtgtgcagtcattgggggtgggggcgtgcttggaggtgtggacgtttgcggggcaggtggctgggtggtcgtgggagtctcgactgatgggggtgtcatctgaagaggatcaaggggcggcgtggactcggggctgttcttatggtggggagcgtgggtgagccgagatgggagggggcgtcgggattgtgttggggggcgcccaggggcgtggggcaaaatggtttggggatagggttttggggctgtattggaagagctcaaagccgcagtgagcagaatggtttcggaagtccgttagggcagcggcaaggtcaggaaacgccccacacaccctctgtctctgctcccagcggagccccagccccggccgcccgcacggtgcgcttgctcctgcggctctggcgcccacgggcccggcaccctcgaacctcctagaaccgcgcccccgtgtctccgcgccctcttctggtaggccccggaactgcatccaccctggaggcgcacgcggcgtccctgcagccccccgcgcggccccagtggatgccgaagccccgacgggacacacggtcctgcctgggctcgcagaatggctttttattcccaaaggctctgcgccgcgcacctgggcccagcccagggtgggctggcttagtcgttgggcctctggttgtgcttagaagtggctgaggccgctgtgccgggagctgcgcagcgagctggcctcccaggcgctcggtgttaggcccagccccgcggggccgcccttggctccggccctcgggggcaagaggcgaagcagttggcgcagcacggcctggcgcagtaggatgtacacccaagggtccaggatctggttccaggaggcaaggcgcacggccaggaacagtggccgctgcagggaggtagagctccagccgccgacggccagcgccaccaacacctgcgggggaagccggtgtgagctatagagcaggcgcgggcgcaggggggcgcagggatggtgggggcgtggctggaaggtaaaagcctgggaggaggggcgagccgtcgcagggagggtaaatggggatccagatgagaaacggatgcggaaaaaaaaggggggcaaagaaacaaacaccttcagtgggtgggggtccggccgtagaggagtctcaggtgtcccggaaagaggaaaagcaagggggttgggtgaaaggactagggaatgaagcgcggcgacttataacggtggggcaggagaggaggcttgtgtgggtcggggtgcgctacaaagaccccaaaaaggaagaggagaggggggctaggaggaaggatgggaggtcagatggagaaggcgatgctggctttcggggcaggtggggcctctaggggccggggccttggttgagtccaggatggaggccccaggtgtcctgggacgacaaagggcgggagggtgccgagagggagcgggaaggagcgtggctcgaggggccggtgcgcccctcaccagcattgggctccagcagatgcacgacaccaccatgataccgacaagctggcccaccatctccacgtcgtgggcgcgagctctgcgtgccgagccgctgctccgagagccgccaaagaaggtggaggccgaagcgatggacgaggcggacgaggcggaggccgagcggggtccgtgcgccccccagcgacgccggctgtcggggcctgaggccgggggaggccgtcgggagcggcgtcgccagcgggcgcgtagcagggccaggccgctgagcgtgttgcacaccagcgcggcgaggagcgcgaccaggccgaggctggcgaagaggccagcaagcagtgcctggcgccagccgcccgggggacccaggccgatgaagcaccacgtgcccgggtactgcagctcatagcggcccacgcgcgccagcggcagcagcgccacggccaaggccaccgcggccaccgcggccagcgccaggcgcgcgcgggcgaccgagacccgcgcggcgtggagcagcggccgcgtgacgcccacgcagcgctccacggccatgccacagcccagcagcagcgggcacaggccgaagaagaccatgcagccgcccaggaagtggcaggccccgccggccggagcgcgccccgcagtgtacagacgcagcaccagcgcgcccgggatcacgtggcccgccaggtcggtggccagcaggctggccacgaacagcaggaaggtggcggccgagcggcggcgtcgcaggcggcccgcggcctgcgccagcagcgccagcgccagcaggttggacacggcgcccagcgtcatggagaagatgggcagcgcgggcgaagcgcccgacggcggcacggccgacgtgttggggacccagggcgccgcgcatgtggtcgcctcgcccgccaggctcaggttgaggggcccgcaagggctcatgtcaggcgccaggggtgctggatagaggagaggagggcagagtgaggctggctgggcccgggcggggaccagcccacggtgccatctcagaacatcagggcctgtttgactccatggcgttctcaggcggcccctctgcccatggcagttgccatgggcaactccaaatgacctggccactccatttggaaacccttctccctctcttttgcctctcaccaccccatctcctgctccagggcctccctctaaccccactggccctttctctgcccttcatggtttcctgcaagattccccccagccccgccctcaggcatctctgccagtgcctccgacccccaccttccatttttacacccagcaaattcctggggcctgtggctccatctgatagctctcacccatttctgccactgtggccctacctgactttccccatgtcagctttactccagtcccatcctcgatgccccagccccatctctaccaccacgggcacatctctccccacggccatgtccctgtcccccatggacccatctctgaccccacatggcacagccacatctgtgccatggacccatctctgcccctgccccatggacctgcctctgctccactgcggtctctcgccaggccctaccccgatcacctctgcctcaccctgggtgcccacggttccactccatatccctgccccagaggcctggaggcggccccacgaccatccactctttgatatcctggtggtgagggctgaaagggcggaactgcccaccaggccagatgggaagggaggatggacagacggtaagacagggacgcacagatcagggagaagagcccggggacacaggacggacagcaggtggccatggccccaccccttcatgccctcctcctccccaatcagggaccctcatgtgcaacccccttacccggcactgcctgggatgtggggtccccatcaccggccgctcagccctgccgcccactgcgccctggctctccggcaagccgcttcctccctccctcttcctggggcggctcctcagctcctcccgccgcccttgctggcctccaggggccgctccaccccgcgcacgcccgctgggggcctggagtggcagagacccccctctctgctcctggcaatgggcgggggccactctgggccccagcggctccctccacgaggagtgaggctccctggagttggtctggccccatgtgaccccctcctcccagcagggcgggagcagcccccttcccccccaggatcgggcctcttgcctcattaataaagcggataaaatctaaacactggaaaatgtgagcgtcgtctggggcgggctggggcagctgcagggggtgccactgcccccctccctggggctttggagctagagaggctaactccaattctgtggggccagcaatgccccccctgccctgccaaagccttcgtggatgtcggggtgggtgctggtgggcagggcctcgggtagaccagcttgggtcaggcccagcctggccaggggatccgcctatttatacaggggcttaagccccggctagggccacagcgagtcatatcctgggaggaggctgaaagggggcaggggaaccaggaggcctggcgacctggggactctccccagtgactggctcctttaagatgggctgagtgacacctgtgacacacgtcctaagacacaaagactcgcctcctgccctgagaagtagggtcacactggcacagcctcacaccctaagacatacaatcctgtcacttaccactcagtttcatcctgtccccatctcagcacagccaggttgctgccgccacatccctgaactcagggtcttacccccagcgccgggacgcacccagagttactgcctcaattccagcccctcccaacaccccaaaatgcagccctctgagatgatcacccgaaccaccctccttagtgctgggaaatagggtctcacttggcaccccgagagatacacacacgcacacacactccttattgccaaaactgcccctgaccacactctgtttgactttcaatgacccctcaacaatcccagacaggccccaccagcacactccgtacacccaaggcacaagaagtgacaccccccgccgctggacaccagagacctagctggccacccccaccctcacccagaaacagcaacgccctgagacacacacacctgcacccctagagacccctagacctagccagcacccccacccaggaaacagcaacaccccgagacataccctgacacccctgaacaccccaaggcctagccaagcacccctccttgccccagaaacagcaccctaagacacacacccccacaccccgggacaccccaagacacagtcactccgttgcactccccaccaccagacactgccagttacacctgcaattgccctggaacacagagccggttatcacatcccttacccacgacacagccctccctcattgcgtcacgagccatcaacactcttgatagactcacagtgctacccaacacccgagacacacatagccacaccccttcaccaccgcaagcggctcccagcacagacacctgaggagcccacaggtgcccggggatgccctgagtcaccaggactgcggctccccgactccacccgggtctgtccaccaacacccagcccccagggtcttccccttttcccccttcccctcttcctggtggcccagtgcccgcccgccttttggaacgaggattgcaagctggcctcggacttccccacagcctctcggctcacccccaagcattcctgtggggccttctggcccagcgccccttgcttcaatcccttcccttccctccaggtctggccagggtcccaccccgcctttccctgatcaccctcaatcctcgaagatgagtgggttgtcaaaacaagtatgctgggtttatgtctaggacaaagcagggtgccccatggacgcctgcgtgtccagcattgggccgggtggggtgggggctgcctcacgcctgcccccaacctcccggtgtaggggtggggctctggcaggcctgaggttccatctttctatttccaagccaggtttcaatgccctggtgctccccacggtccgggggttgtcaccagctgcagacagcagccttgtgaagctccagggggtaggaggccttgtgggagagggggcaggatttgaaccctcagtagtccaggaagctctggccctgcctggaagcctggtggcctgcagccagaaggaacagtgggagggggcaggtggcttggtgccagctcctaattcaatttggagcctgcggaagatggatttcagctgctgaattctttctcagccccaatcttccccctctcccaccccgaagccacacaggtccaacagcagatagattctttatgttcaagacagcaaattcagatacaaaaacccaccgccatcgtccctccctccctcctgctctgggccagggatgggcctggaaggagagatgggaggtggggaggaggttgcggggttcacagcagactcgtgtcaaatgcggaggtaacaggctccacagggagggggctcctctcaggaggggtgagggcattattgcatttgctggggggaaggacaaccctctcccctgtattccctgcgtcaggaaactaggaaggtcatgacccccaaacagaacccaaggccccagggagacagagggaccagtttggcagctgatggtggaaagtggtggaggcgggggtggccgcccaatttggctgatccctcccctccctgtgcctgacccagctgaggtaggtggggaacagggcacaggggggccggggaccccggccagactgggaaccagggaggggatggtaccgattggagcggggcagggggcctggccccacctcccctcaccatcgtccttgggctgctgagctaggctcaggctggaggctcgggtcctgacgtcagtgtccctgctgggggcccccaccaggttgcgcccgggtcatcatcgcagggtccgggggcagtcctagtagcggccgaccttggcgtccccaatggcgccccagacgtcaaagacgaactcgtcagggaaggcaaagtcacccagccgttcgtccagggcctcggccagctcatccgggttccttttgtcctttcccagctccaccatggtggccgctattgggggaggggtcagaacggaggcacaaatgacaccagggaccaaggggctcagggtggattcggcccccagcagacctagatgccccctcccccaggcagccctcactcacccagctccgtgtccctgatacccatgtaactctccagcaggtcatccaccttctcaatggccttctcttcaaaggcagagggctgggggccagggaggggtgacagcgacatcataacaatgtgaatatacatagtaattggacggactgccattgtcaccactttacatatattcgtatttagacctcaggacaaccctgagaaggtggtatcggtgttcagctcatccccattttactgatgggcaaactgcggcccatgtgcccaaggaaggtccctgggagctgggaagtggcagaagtggactagaatccaggctgtctgcccagagtcccctcagctaacaggtaatgctgccggttatgaaaaggaagggagggctgggcgcggtggctcatgcctataatcccagcactttgggaggccaaggaggctggatcacctgatgtcaggagttcgagaccaactcctggcctggccaacatggtgaaaccccatctctactaaaaatacaaaaatcagctgggcatggtggtgggcacctgtaatcccagctacttgggaggctgaggcaggagtatcgcttgaacctgggaggcagaggttgcagtgagccgagattgcaccactgcactccagcctgggtgacaagagtgagactctgtctcaaaaaaaaaaaaaagaaagggaagggatgccggagatagggtccggctggagcactcaccagatcctccaccgtggcggggccccgggatcggagccgcagggtccctcggccagtgcccagttgtgggccagagccagggcggccacccgctgaacgctggctgatcatgtctgtgggaggcaggagaggagtgagtgtgggggaagcttggttttagcacgttctgggcaggaacttgtccttcctggctttcaccaccaccccaaacttctccaggcttctgcaagtttctgggggctggggccggggtgatcccaggagggcaggaatcctgactcaggcctggcatggatgtggggcagagcagggggaacagctgggggccaggaataggaaatgctggaggggagactggaggggccacttctgctcccaggggctgggggacaggaagcaggtgtaccccagcctgagtctccagctgcctgagtccgtctcctcttggccaagggggtatggctgctgggccacagaccagccctacctgcccagggaagtgatttagtcccccacccccacctcaggggcctggggcccattcctgagagttagtgaagccagatggaaaagtgggggggctggcactgagcagtcaagcctggcctgttggggatagggggctggccagggctgagggcgcttggctgggctaatggcccctggaagctaggtgtgagggcaacttcctcctcgcccccgcccttctcccaggctgggccaagggccagcaccccgtctggggtcgggaggagctgcaaccccttccctttctgcaaccccttccctttcggcaggccaggcttgggcgccacctgctggccgctcccggcaccaccgcctgcgcccatgcgagcagcgccactggggaggtccagggggcggctcctcaccgaaggccttgcgaggctccgtgagcttcagcgtgaaggtacggcctcggggcagctccttgagcagccgggccacctcgtagtgccggcagcccagcaggctctgcccgttaatggcctcgatcatgtcgcccacgctgatgaggtggatgtggtcgatcacgctgccctccttgatgcgctgcgggggcggggagtcatcagcccttggggctctgccctggtttccggggtcccatggcccaccctcactcccaggcctccggggtgccccgtctccccaggcaccttgatgaaggcgtagccagccccgttgtccgtgatggtgagcccgagtgcatcctccgacttgaacacctccacctccttgcgctgccccttcacgtgggcgaagatgaagtcctccagcccgatctggccccccaggagcttgtccatgtccactttgtgggtgttcagggtgcagaacatcacctgcaggggtgggagacgctgaaacctcttccccctccctcccccttttctaatcaccactggagggcgaagggagagagctgggagaggactagggggattccatcccagtaactcatcacccactgagcctgagccagggccacagcagggcccacattagcgtgtcagctctgctaggactaggatttagttttcctttctctttttgagacagggtcttgctctgtcacccaggctggagtgcagtggtgccatcatagtcactgcagccacaacctcccagattccggcaatcctcccacctcagcctcccaagtagctggaactacaggtgctcgccaccatgcctggctaatttttgtattttttgtggagatatggggtctcactatgttgcacaggctggtctccaactcctgggctcaagtgatcctcctgtctcagtctcccgagtagctgggaccacagacacgtgccaccacacccacatagttaaaataattttttttagagatgggagcctcattatgttgcccaggctggcctggaactcctgagctccagtgatccccccatctcaacctcccaagtagctgggactataggtgtgcaccactgtacccagctaggatttcggtcctagcaaaaattcattgctgtgccaggtgcggtggctcacgcctgtaatcccagcactttgggaggccgaggtgggcagaacacgaggtcaggagatcgagaccaacctggccaacatggtgaaatcctgtctctactaaaaatacaaaaattagctgggtctggtggcgggcgcctgtaatcccagctactcgggaggctgaggcaggaaaatggtttgaacccaggaggtggaggttgcagagagccaagatcgtgccactgcactccagcctggtgacagagcaagactccatctcaaaaaaaaaaaaaaaaaaaaaaaaaaaattcattgctgctttcagggaacggagcctggcacacagtgagtgctcaggaaatgcttgtggaggacacagaaactcatcccacttagggagacccctgcgtctacttcttgctcaaacccactattgccctccttgaccccctcccatctatccccacagtgcttggcaccaggcaagcctgcctcccacagcgttgagtttctccaaggcatcacggagaagtgcatctcgtatctggcctctagcctccaccatctcatggggcactggcctcccaatgcctgacaggaactcagcatccagccctggccatcagctcccacagtctgtagaggtgcaggcctctcagtgtctgatgggaactcagcatttaactgtggccatcagctccccacaatctactggggtgcaggcctcccaacgcctgatgggaactcagcgtccagccctggtcgtcagttttgcacaatcgactgggatgcaggcctctcaatccatccatccaatcaatccatccagccctggcctcccacagtccattggagctcaggtctctcagtgcctgttgggaactcagcatccacccctagtcttgcacaatctactgggggtacacccctcctaatgcctgatgggatgtcagcatgcagccctggccatcagctcccacaatccactggggcacaggtctcccagtgcctgatgggaactcagcatccagccctggcctccagttccccacaattcacaggggcacaagcctcccagtgcctcatggggactcagcatccagcccaggccattggcccccaccactgagtggggcccaggctcagcatctgcagcttcagcatctgagccccagctcatgaacaggatgcaggcccagacctctggtccaccatcagggaccctggtgcccggctccccagtggatacctcggcagttggcaggcggaaggcctcggcgatcttgccatacagctccttgacgttggtgaagccctcgatgcggccagtgggactgccatgggccagctgggtgtggaacacgaggcggggccgcagggctgggggaggggggggcaagcccatttgggggccccccgacccacctccgcccagaggccctggctcccccacgcccagccctccacggcctggctcagcctcctcattttccactagagggggcgcctttttccgccgccccagtcccagcggcatgagcagcgagaagtggggtcaccagaagatctgcaggacaggaagtggggctcagggcctgggcagaggccttgggtgcccctcccacactactcgaaccatacaggcccaaggaaatactcagagaacaaattggcctcggttgaaatcctcatctcttgtatagtgacaggacacttatataaaagtaataatagggctgggtgcggtggctcacgcctgtaatcccaccactacggaaggctgaggtgggcggatcacttgaggtcaaaactttgaaaccagcttggccaacatggtgaaaccccacctctactaaaaatataaaaattagccgggtgtggtggtgtgcacctgtaatcccagctacttgggaggctgaggcacaagaatagcttgaactggagaggtggaggttgcggtgacccaagatcgcaccactgcactctagcctgggtgacagactaaggctccgtctataaataaaataaaataaaataaaaagctcacacctgtaatcccagcactgtgggaggctgagacgggaggatcacttgaggtcaggagttcgagatgcctgaccaacatgtcgaaatcccatccctaccaaaaacacaaaaaaattagccaggcatggtggcgcatgtctgtaatctcagtgattcaagagggtgaggcataagaattgcttgaacccaggaggcagaggttgcagtgagccaagatcacaccactgcactccaccctgggcaaaagagcaagactctgtctcaataataataataataataataataataataataataataataataataataccagctaggattattgctttgtgaccttccttgtgtgtttcatttgttgttgtgacagggtcttgctctgtcacttagactggagtgcagtggtataattaaagctcactgcagccttgatctcccaggctcaagggatcctcacacctcagtctctcaaatagctgggcccataggcacatgccatgaagctcagctaacctttattttatttttttgagatggagtctcactctgtcccctaggctggattgcaacggtgtgatcttgactcactgcaacctctgcctctcaggttcaagtgattcttgaagaagagaccctgactctttttttttttttttttttgagactgagtctcactccgttgcccaggctggagtgcagtggtgcaatctcagctcactcactgcaatctcttgcctcccgggtacaagcgattctcttgtctcagcctcccaagaagctgggattacatgtctgtgccaccacaccggggtaatttctacatttttggtagagatggggtttcaccaagttggccaggctggtcttgaactcctgacctcaagtgatccgcccacctcagcctcccaaagcgctgggattaaaagcgtgaaccactgtgcctaatgctcagctgacgttttaaaactttttgcaggccgggtgcggtggctcatgcctgtaatcccagcactttgggaggctgaggcgggtggatcacgaggtcaggaattcaagaccagcctggccaacatagtgaaaccctgtctctaccaaaaaaacacaaaaattagccgggtgtggtggcatgtgcctgtagtcttagctactcaggaggctgaggcaggagaattgcctgaaacctgggaggcggaggttgcagtgagctgagaccgtgccattgcctgggtgacagaatgacactccatctcaaaaacagaaaacaaaaaacaaaaaacaaaaaacactttttgcagagatgaggggtctcaatatgttgcccagagtgatctcaaactcctagactcaagcaatcctcctgcctcggcctctcaaaagtgctgggagtacaggaatgagccatagtgcccgcctgtaatcccagcactttgggaggctgaggtgggcagatcacctgaggtcacgagttggagatcagcctggccaacatggtgagaccccgtctctactaaaaatacaaaaattagctggccgtggtggcgggcgtctgtaatcccagctactcgagaggttgagacgagagaatcgcttgaacctgggaggcagagattgcagtgagctgagattgcaccactgcactccagcctgggcaacagagcaagactcagtctcaaaaaaaaataataaaaataaataaataaaagagtcagggtctcttattgctctgtccccaggctggagtgcagtggggtgatcacgataatggctcactgcagctttaacctcctgggctcaagccatcctccattctcagcctcccaagtggctagaactacaggcatgtaccatcacacccgactattttttttttaaattttattgtaggcctggtgcgatggctcacatctgtaatcccagcactttgggaggctgtgagcagaacacttgaggtcaggagttcgagaccagcctggccaacatggtgaaaccacatctctactaaaagtacaaaacttagctgggcatggtggcagacgcctgtagtaccagctactgggtaggctgaggcaggagaattgcttgaacccaggagacgaaggttggcagtgagcagagatcgtgccaatgcactcactccagcctgggtgacagagatagactccgtctcaaaaaataaataaataaataaataaacaaatatatatatatatatatagagagagagagagagagagagagagagagagagagagacagagagagggagagagagagaaaggagttcttttttttctttttttgagacagagtctcactatgtcacccaggctggagtacagtggcgcgatctcggctcactgcaagctccacctccagggttcacgccattctcctgtctcaggctccggagtagctgggactacaagtgcccgccaccatgcccagctaattttttgtatttttagtagagacgaggtttcaccacgttagcaaggatggtctcgatctcctgacttcatgatccgcctgcctcggcctcccaaagtgctgggattacaggcgtgagccactgcgcctggcaaggaggtgatctttctctgttgcccaggctggtctggaactcctggcttcaaggagcttttggcctcccaaagctctggcatgacaggtatgggccaccgtgcccggcctgtgaccttccttaaccctcacaccacactgtaacacagggatcacgttatgctacaattatgcccattgaacagatgagaaaatggaggctgaaagcgactacgcttctattttcctctcagccacagtcactaacactgtgtgcaaaaaatttctgactctccccctttggaccaaacaggtggatggcacttcctggcctccttgtgactgggcagataaatgattatttctggcaaataggttgtgagaggaagtggcacatgacatttctgggctgaggcatttaagtgctggagcctccagagatctatctttcccaggcagggtgatgagccacatttgatatggtggcgactctatgaggccgggccctgaatgactacggtgaatggtgccccctgctgagccgcaatggaagtgtagcaggaagaaaaagcaaatctttgctgaattcagccactaagacttttggggttgttttctacaccacatacattttttttctgtttctttcttgctttctttctttctttttttttttttttttgagacagagtcttgctctgtcacccaagcagcagtgcagtggtgcgatctcagctcactgcaacctccgcctcctgggttcaagcgattcacctgcctcaacctcccaagtagctgtgactacagaagactcctgacctcaagtgatccacccgcctcagcctcttgaagtgctgggattacaggcatgagccaccgcgcccggcccgcttctttatttctctctttctccattctcccctcccttcaaacaattttttttttctttttagtacttactgtattctgtgcaccattttagatactgtcttcaataaaaaaagcaagatccctgactagggccaccatgttcagttacacaagttgtgtactgtgcaaaattactagaccaaggtggcaagtaggactgaaattcggtctgtgcactgcctgccaagctatatttcttggtgtggtgtctgccaggaggaagagatgcctttctttttttcttttttttctttctttctttttttttttttgagacagagtctgttctgtgttgcccaggctggagtgcagtggtgcaatcttggctcactgcaagctccgcctcccaggttccagcaattctcctgcctcagcctcccaggtagctgggactacaggtgcacgccaccatgcccggctaattttttttgtgtttttagtagagacggagtttcactacgttggccaggctggtctcgaactcctgacctcgtgattcgctcgcctcagcctcccaaagtgctgggattacaggcatgagtcactgcacccggccgaagagatgtctttctaattcactcacagatgctatataggctagctggggctctgcacatgacctccagaagtggacagtccggaagaggaaatgcacagggagcagggaaatgtgtaaatgtctaatataaattttttcctttattttcctttttttttttgacagagtcttgctgtgttgccaaggctgaggtgcagtggtgcaatcagagctcactgcacccttgccctcctgggctcaagtgatcctcccgccccagcctcttgagtagctgggaccacaggtgcttgccaccatgccctgctaatttttttatttttattttttagagacagggtcttgctatgttgtcccggctggtctcaaactcctgggctcaagtaatcctcctgccatggactcctaacgagctgggattataggcatgagccactgtgcccagcctcatataatttttaatagtgatatggagacaaagcaagacaagttctatagacaagatcagtgagggcgtctctgagcacgtgaagctgaacttgagacctgaaccacaggaggaagcattcatgcaatgatttggggcaagaacgtcccaagtagagagaacagccagtagaaaggccctgagctggggctgggcatggtggctcaagcctgtaatcccagcactttgggaggttgaggttgacggatcacatgaggtcagcagtttgagaccagcctggcctacatggcaaaaccccatctctactaaaaatacaatacacaggtgggcgtggtggtgcacacctgtgatcccagctactcgggaagctgaggtgggagaatcacttgaatgcaggaggcggaggttgcagtgagccgagatcacaccactgcactccagcctgggtgacaaaccgagactccatctcaaaaaaacaaagaaaagccctagccaggcgcggtggctcatgcctgtaatcccagcactttggaaggccaaggcaggcggatcatgaggtcaggagtttgaggccagcctgaccaacatggtgaaaccccgtctctactaaaaatacaaaaattagccaggtatggtggtgcatgcaaacctcatctctactaaaaacacaaaaattagctgggcgtagtggtgcatgcttgtaatcccagctactcctgaggctgaggttgcagtgagctgagatcacgccattgcactccagcctgggcgacagagcgagactcggtctaaacaaaaaaaaaaaaaagaaagaaaagccaagccctgaactgggcatgcaattggcatgtttgaggaacagtgaggaggcctggggggttggaacagtgagtgaaggggggatagtgagaacatgagggcagggaggtaacaggttgctatgttttcctgattttttttttttaatggggtctcactctgtcgtccaggctgcagtggagtgatgtgatcacagctcactacagcctcaaattcctgggctcaagcaatcctcctgtctcaacctcctgaatagctgagactacaggtgttcacagccatgcccagctaatttttattttttgtagagacgggtctcactacgttgcccagattggtcctgaactcctgggctcaagcaatcctcccgccttggccttccaaagtgctgggattataggcatgagctaccacacccagcctgctatggtttggataaggtttgccccattgaaactcatgctcgaacaatcgattggctaacgaggtcgatgacgccaggcacaagatgctgggcctaccgcggtagcgtgagggaagccgtgcgttctgttccaaggcatctgtgagcccatggagtatacaccatgagcaaagctcaccctcctgagttgaaaaaatttacggacaagaagttttcattgaaattaaatggtggcagacatgtccaaggaatattgcggggatttgatccctttatgaaccttgtgatagatgaatgtgtggagatggcgactagtggacaacagaaaaatattggaatggtggaaatacgaggaaatagtatcatcatgttagaagccttggaatgagtataaataatggctgttcagcagagaaacccatgtcctctctccatagggcctgttttactatgatgtaaaaattaggtcatgtacattttcatattagactttttgttaaataaacttttgtaatagtcaaaaatgttttttcagatgttctgaatatacaatattagctctcattccaattttttctaacatgaattttcctggttgacattgatttcaaagggttttatgtattaaagtgacagaatcttattaaatgtgaaacatggcaaggagaaaaaaaaaaaaaaagaaactcatgctaaaatttgatccccaaagtggtggtgcggtgttgggaggtggggcctagtgggaggtgtctgtgttatggggccagatctctcctgaatggcttgaagtagctctggaagcaatgagtgcttgctctcaagagcccggattagttctccagaacttacagtagttggccaggtgcagtggctcacacctgtaatccctgcactttgggaggccgaggcgggcggatcacgaggtcagcagttcaagaccagcctggccaacatggtgaaaccccgtctctactaaaattacaaaaaattaggccaggcacggtggtgggcacctgtaatcccagctactggggaggctgaggcaggagaattgcttgaacctgggaggtggaggttgcggtgaatcaagaccgtgccattgcactccagcctgggcaacagagagagactcagtctcaaaaagaaaaaaaagaaaatacattagttaggccaggaacggtggttcacgcctgtaatcccagcactttgggaggcagaggcaggcggatcacctgaggtcgagagttcgagactggcctgaccaacatggagaaaccccatctctactaaaaatacaaaattagctgggtgtagtggcacatgcctgtaatcccagctactagggaggctgaggcaggagaatcgcttgaacctgggaggcagaggttgaggtgagctgagacagtgccattgcactccagcctgggcaataagagcgaaattctgtctcaaaaagaaaaaaaaggccaggtgtggtggctcacgcctgtaatcccagcactttgggagtccaaggcgggtggatcacgaggtcaggagatcgagaccatcctggctaacacagtgaaaccccgtctctactaaaaatacaaaaaaaattagctgggcgtggtggcacacacctgtagtcccagctactcgggaggctgaggcaggagaatggcgtgaactcgggaggcggagcttgcagtgagccgagatcatgccactgcactctagcctgggtgacagagcgagactccatctcaaaaaaaaaaaaaaagaaagaaagaaagaaagaaaatacattagttaggccgggtgcagggacggtggctcccgcctgtaatcccaacactttgggaggccgaggcgggtggatcacctgaggtcaggagtttgagaccagcctggccaacatggtgtgagccaaagaaggctggtgtgagccactgcgctcagcctatattttcttatgtaaaagggacttcctggtgcctcctatccaatggtctcttccagggggccatgctggattcagcttggccgcatccaatcttttttttttttgagatgaactctcactctgtcacccaggctggagtgcaatggcgcgatctcggctcactgcaacctccacctcccaggttcaagcgattctcctgcctcagcctcctgagtagctgggattacaggtgcgtgccaccacacctggctaatttttgtatttttagtagagatggggtttctccatgttgaccaggctggtctggaactcctgacctcaggtgattcgcccaccttggcctcccagagtgctgggattagaggtgtgagccactgcacccagcctgcacctagtctcatgtatccatttgttcatgcatccattcgtctgtcccctaacacaccctctcatctcacctggtccatctccatgatcacttacctaaactagtgtggttgcctcctgtgggtttcccagcttccaccctcaccccctacgacttcttgtccagacagcagccagaatggtcctgtaaaacataagtcatgtcgcatttgtctctgctctgacccctccccgggctctgacctcgctggaaagaaaaatcagtgtcggccgggtgtggtggctctcgcctgtaatcctaacactccgggaggccgaggtgggcatgagccaccacgcccagccatatattttcaaaattagccaggcgtggtggcgggcgcctgcagtcccagctactcggaaggctgaggcaggagaatggcatgaacccgggaggtggagtttgcagtgagccaagatcgtgccactgcactccagcctgggtgacagagtgaggctccatctcaaaaaaaagaaaaaagaaaagacccctcatcatccctccaattccgccagctctacgcactgggaggcaggaaactaaaaacatgaatctggaacctggcttcatctcttaatagctgtgtgactttgggcaagggtcttaacctctctgagctccaaggaaatcatgcatgtgcttggaacagtcctggcacacaataagggttgcataaatattggtgacaattactgctactgccatcttttgtttttttttttgagacggagtctcgctctgttgcccaggctggagtgcagtggcacgatctcagctcactgcaagctctgcttcccgggttcacgccattctcctgcctcagcctcccgagtagctgggactacaggtgcccgccaccatgcccagctaattgtttgtatttttagtagagacgctgtttcatcatgttagccaggatggtctcgatcccctgacctcgtgatccacctgcctcggcctcccaaagtgctgggattataggcgtgagccactgcacccggccttgctactgccatctgtaccaagattcaagcttcctccttttcccaagatccctacatcctgaccaccaattcccagcctccttactctctctctctgcccaccccactgccctggttcatgccagcttccgtgtccccacccgtgaggaggcattaacagcagtgaggaaagtgagtgagtaatgaatctgcctgccacggccataagaggcttcgtggcctgggttcaaatcccacccctgccacttaccagctgtgtggctggggggcaagtcacttcacatcacagggcctcagtttcttcatctgaaaaatgggtggaattcctgtcactctcaaggtggttgtggaaatccaaagagattacccacgtatcccatctacactctgcctcagactccatttaaggacgctgttgtcattactatgggtgtctcctcctctgccctgccctgcccaggaatatcccaaccctctctgcctgccaatacctactccaggcccactcctccatgaagcctcccaggcttgccccagcatgctggaactgcccctgtggtacagatggctcaggcccatgaacttaattgcatgctgccctggcagaactcttgtcttccagcttcaggctgtcatttaacttcatgtctctattttaaaacgtaaaccagatggcatcactgccctgcctgaaactttacaacagtttcccaccttctggaagaaaaactgcaatctccttactgtgacccacaaacccctgcagaatcgctgctctgggttcatcttctgctccaaccatgtgattccaaacttggtccagcctaaagaccttggccttgcccatctctctctcttttttttttttcgagatggagtcttgctctgtcacccaggttggagtgcagtggcgccatctcagctcactgcaacctccacctcctgggttcaaacgattcttctgccctagcctcctgagtagctgggattacaggcacgcaccaccacatccggctaatttttgtatttttattttgtatttgtttatttttatttatttatttatttttgagacggagtttcattcttgttgcccaggttggagtgcaatggcgcgatcttggctcaccgcaacctctgcctaccgggttcaagcgattctctcctgcctcagcctcccatgtagctgtgattacaggcatgtgccaccacgcccagcttattttatatttttagtagagacagggtttctccatgttggtcaggctggtcttgaactcctgacctcaggtgatctgcctgcctcggcctcccaaagtgctgggattacaggcataagccaccacgcctggcctatttttatttttttttgagatggagtctcgctctgtagcccaggctggagtgcagtggcacgatctcagctcactgcaacctccgcctcccgggttcaagcgattctcctgcctcagcctcctgagtagctgggcttacaggcgtgcgccaccacacccagctaattttcatatttttaggagagagggggtttcaccatgttgatcaggctggtctcaaactcctgacctcttgacccacctgtctcagcctcccaaagtgctgggattacaggggtgagccatgcccctagccaatttttgtatttttagtagagacagggtttccccatgttggccaggctggtctcaaactcctgacctcaagcaacccacccgcctcggcctcccaaagtgctgggattacaggcgtgagccaccgcgcccgggcccccttgcctgatctttgctgggctggcaccccttgcccacaactactctctacagtaccacccgctcatattttattcatagcagttagtgccatctgaaattatcttctttatttacttgctaacttgtttgttggctgcttccttcctttcagagtgccaactcctcaaaagtagggattttgttttgttcactgttgcattttctgtgccaagaacagtgcctagcacatgcacgtagcaggtgctcactaaatatttgtagactgagtgaatgaatgtgtctcaggtcctcgttctgattgctctctgtgctccccatccttgaaacagccccctaaacatgcctgctgtgcggttgccaactgtcctaggctccccactttccctggctcccctcacacctgaacacagagatgaagagccacttcagcccggatattgagtgtttgggctggaatttcagcatcctcaccccctcatcctgggaagggcctgaaacttagcaaccccacggccacacagaagcagtgtggccagcaggaggaggggaagggggttcctgggagcacacagaagctaggggaagggggaaaccacgcccaggctccccgttccagcacagtgttgctttggagagaaggagggaaagaggcctctgattcactcttgaaaaaccggctcctgggtgtttccggggagaacgcctacttcccagcctcggcccaggttgccaggggggaacccagtgggcccagaccccagcatcctggccccctgcagacgccactctcttctctggacccaggtagttagacctgccctctccagctctggggagaagggaaaggagggcagcttcctgtttgagtggctggtaaagcaaaagaccagcaggtgtggccctgatgatgagtacggggtagggggtgggaggggtagggggccggagctactcagcaacaactgagccgtggagttattggtatccagtctagtgggtgtgactccagttctggaccctggggcatgagttccagtcccagatgtgccagttactagctgtgtgaccttgggcaagtcactccacctctctgggtaggctgcctcaccttttttacaagaaggcacagcacctcccatgaggtgtttagagtcaattatcctcatggtaaatgcctgacacggaagctctccaataaatgctagctgaggtggagtttttcatgacgattattattcagaccgtggtcctcactgcgtcccccccaaggccctggagggttcagacgcggttagctcaggggaagtgcccaggaaagggtcagaaacactgaccccgcgcctgtccacgctgggatggggacagtccagccgggggacggggggaggggcaagcccagaaaccccagcccagcgttgggaggcgtttgtcccctgcccgccagcaggaagggagctgcccccaccaccccccacccccgcttcccctgggaaggggcctccggcatccccgcgcgcagcctagacctccagtcgcgtccacggcgccggccccaccctgcaggatcggccggatcctcgcaggcccgcgacccccgaggcccccggagcagacacatccttctcgcagaggccactcacctgctccgccgccgccgccgccgccgccgccgccgccgctgcctccgcctccccgtgcgcacccggctcggccctccgcaaactccagaccgggcctctcccgcagcggcgcctggggggcggggccgacgcccgcggccggccaatcagcggctgcctctcggtgctcgcagccaatccgcgtcttccgcttcgggtggacccgacggaaacattccagagggatccctccgcctcgcccggctcttcccgactcctcccctcgccgcgaagcagtggaccgttccgccccgcctaagccgcggctggctgtaccaccggagggctgaggaggggggggagctgcagctgggccccggccaatcgcgagggaggaaggagacaagcggccaatgggaaggaagctggggcccctgaaccacgtgctgtcggctgagtgtcagtctcgggtgccctgggtggtgaggggcgggggagtcaggtgacctaggccaggtttcggggaaaggattcgaacttccgacgtccaggaaagcggacagtttaggagacctgggtgggggtcaatggcagtccccaacccagttccctgcccggcctcctctgccccagcctggccatcctcggagcggataaaaagatgcattcaatctctgggggcgggcgggggatcgagatgaatagggagggtcccgagtttccctgcttcctgggctgtacaatggacaaaggcattcattcattcattcgttcactcactcatcaaatatttaatgtgccagactgctccgtgccagactctgtcctacctctgaagacgcgtcagtgaataagctgaatgtgctcctggtagaggtaacagagcgtgcaaaagccggacagagagatacagcacgctttaggatactgcaatatcgtgggagctagtaaatcagtgtggaaaggcaagatgcaatgaaagacaagggtgagatagtttatctgcttgttggtttgtttatgtgctaggtcacagaaggtacccagccagcctttcatagatctgtctcctccatctgactgtgagggtggaggctgagtctctcttgtcaacccctcactcccacctcaggctgccacacggcaggttctcagcaaacctgtgtggacaaatagaccatgtagtttataaggaagggggatttatcaggtggacacagatccaagaaacaagagtcacaaatgcacctggaccaggccaggacgctcagttcccgggacaagtgagatttccttgttctagttcaaacccagccacttggacagcaactggggctgaatgctgtgtgttctgggaactgtagttcctggaagcctctaagtgctgagaccctgctcaagctccatagaaagactggttctttgcagttcccagggtgagatgttgtgcatatcagtcccaccaggacctgcagaggggcaaactaaaatgggagatggaaccttgagctttgctgctgaggattgcctagccagccccacccagctggcaaacaccgagattgctgtggcaggccaggcaacaggcacagctattgtccgtcccttcctgttctgctgacctctgccatcccactgagcaatcagttgcctgggctggccagtaccctctgtgggactgtgctgcctgccctgcttgagcctggcatctaagctgccccctgcacacttggagaggacgggatgctgagcccaggggacagcatgactgaggctgcagagtcctgagccagactccaactggctcctgtttcctgatgaggaagtgcccggagaaggggtgatgggattgtgggattgctcaagacacagagcagcactgggcacctcctttctgaatttttttttttttttttttgagacagtgtctagctccgttggccaggctggaatgcagtggcaggatctcagctcactgcaacctccacctcctaggctcaagtaatcctcccatcttagcctaccgagtagctgggaccacaggcatgtaccaccacacctggctaatttttgttgttgttgttgtttgtttgtttgtttttttgagacggagcctcactctgtcacccaggctgcagtgcagtggtgcaatctcagcttactgcaacctccgcttctcaggttcgagcaattctcacgcctcagtctcctgagtagctgggattacagcgtgcgccatcatgctcggctaaattttttgtatttttaaaagagacggggtttcgccatgttggccaggctggtctcgaactcctggcctcaagtgatccacctgcctcgtcctcctgaaatgctgggattacaggcatgagccactgcacgcagtctattcctttgtttgtctgtttgtttgttttgagacagagttccactcttgttgcccaggctggagtgcaatggcgcaatctcggctcactgcaacctccacctcccaggttcaagcgattctcctgcctcaacctcctgattagctgggattacaggcacccgccaccacatctggctagttttgtatttttagtagagacagggtttcatcctgttggccaggccggtctcgaactcctggcctcaagtgatccaactgcctcatcctctcaaaatgctgggattacaggcatgagtcactgtgccaggcccatttgtttgttttttgatagagacagggtctcaccatgttgcacagagctggtcttgaactcctgggctcaagccatcctccctctttggcctcccaaaagtgctgggattacaggtgtgagccaccatgcccagccctccttcccgattttatagctcaagaggaatgcctaaaagctgaggctgggaagtccaatggtgagcagcttagatgtgagcgctacctctgttcctttaaaagaaaaaagaggccgggtgcaatggctcacgcctgtaatcccaacacattgggagggtgaggcgggcggatcacaaggtcaggagttcgagaccagcctggccaacatggtgaaacctcgtctctactaaaaatacaaaaattagctgggtgtgatggtgggcgcctgtagtcccagctactcaggaggctgaggcaggagaatggtgtgaacccgggaggcggagctggcagtgagccgagattgcgccactgccctccagcctgggcaacagaacgagactccgtctcaaaaaaaaaaaaaaaaaaagaaaaagaaaaaacagaaaaaagaaaaaaattccatccttgaatgccagctaacacatgcagaagggaaggttgtgtgcgttagaacatcattgttttgctgagtgcagtggctgcagcctctaatcccagtgacttggaggctgaggctgaaaggatcccttgagggcaggagttcgagactagccgaggcaacatagcaagacctccatctctacaaaaatgggtgtggtgctgtgtgcctgtagtcccagctactcgggaggctgaggcaggaggatcacttgagcccaggagtcgaggctacagtgagctatgagctacagcttcctatgtgccaggcatcattccaagaacttcctatttattaaaccatgtaactctcctgatgacctaggtgcagttttacacattgtatatttgtcctcccactctgtcaggggaaaatttgcttcacccatgatatccttcattggagggaaattcttaattttgatataatagaactcactgtgaagttatattaagaatgcttggctgggcacactagctcatgcctgtaatcccagcactttgggaggctgaggcaggtggattgcttgacaccaggagttcaagaccagcctgggtaacataatgagaccctgtctctacaaaaaataataaaaattagccagaaaaggaggcactggactatagtcccagctactcaggaggctgaggtgggaggatcacttgagcccaggagttcaagcctacagtaagctatgatcacaccactgcattctagcctgggtgactgagcaagaccctatctcccaaaacaaaacaaaagaaggccttttcatccctatatggcaaacttatacttccacattttctttattttttttttgaaacagagtctcactctgtcacccatgctggagtgcagtgatgtgatctcaactcactgcaacctccacctcgcaggctcaagcgattctcacgcctcagcctcccgagtagctgggattagaggcatgtgtcaccatgcctagctaattttttgtattttttagtgaagaccgggtttcaccatgttgtccagactggttttgaactcctggcctcaagtaatccgcacgctttggcctcccagagtgctgggattgcaggcatgagtgagccaccgcacctgactcttccacagtttccttttttttttttttttttgagacggagtctcgctctgtctcccaggctggagtgcagtggcacgatcttggctcactgcaagctctgcctcccaggttcatgccattctcctgcctcagcctcccgagtagctgggactagaggcgcccgccaccatgtatggctaattttttgtatttttagtagagacggggcttcaccgtgttagccaggatggtcttgatctcctgacctcgtgatctgcccactttggcctcccaaagtgctgggattacaggcgtgagtcactgcgcctggccccattttcatttcttcattctacgttttttggttttgttattttatttatttatttatttatttattttgagacagaatcttgctctgtcgcccaggctggagtgcagtggcgtgatcacggctcacggcaacctctgcctcctgagctcaagcaattctcctgccccagcctcccgagtagctgggattacaggctatgccaccacgcctggctaatatttttgtatttttagtacagacagggtttcaccatattggccaggctggtttcgaactcctgacctcatgatctgcccaccttggcctcccaaagtgctgggattataggcatgagccactgtgcccggcccattctatggtgttacttttcctgagtctttattccatccgtagtccacctgaggttgtggggtagaatggtcttctttttctccataacctgtgctgttcagcagctctgtgaccttgtgtgaagcccatcctcttctgtgcctcggtctcctcatttgtaaaatggagataataataatacacaccagccgggcgtggtggctcacacctgtaattctaccactttgggaggccgagacaggtggatcacttgaggccaggagttcaagaccagcctgaccaacatggagaaaccctgtctccactaaaaatgccaaaaatcagccgggtatggtggtgtgcacctgtaatcccagctactcaggaggcgcaagaatcgcttgaacctgggaggtggaggttgcagtgaaccgagattactccactgcactacagcctgggtgacaaagtgagacctcatctcaaaaaaaaaggccgagtgtggcggctcatgcctgcaatcccagtactttgggaggccaaggtgagtggatcacctgaggtcaggactttgggaccggcctggccaacatggcaaaactctgtctctagtaaaaatacaggccaggcgtggtggctcacacctataatcccagcactttgggaggccgaggcgggtggatcacgaggtcaggagatcgagaccatcctggccaacatggtgaaaccctgtctctaccaaacataaaaaaattagccgggtgtggtagcaggcgcctgtagtcccagcttaggagtctgagacaggagaatggcgtgaacccgggaggtggagcttgcagtgaggcgagagcctgccactgcactccagcctaggtgacagagcaagactccgtctaaaaatatatatataatatatatatatataaattcgctgggcatggtggcgtgcacctgtaatgccagctattctggaagctgaggcaggagagtcacttgattctcgggaggcagaggtcgcagttagcttgattccggaggcggaggttgcagtgagctgagaacatcccactgcactccagcctgggagacagagcgggactccgtctccaaaaaaaacaaaataaaataaataatagtacacacctccttaggtggttatcagcatgttaggattaaatgggctattccatgtcaaatgccccgatggtgccaggcagatagtaagcacttactgcataccagctgccattactaaaatgtgctgagggcacaatcatagatagacgcaatatgtcataatggacacaccatagaaatagaaacctgtattggatcctcgctgtgtgtcaggctctgtgctggtcgcttttcatgtctaatttcactggatcatgttgagctcctggggatgggactgatagcacccccactctacagaggaggagactgaggctcagagaggggagacatgagctgaaagatgcacagtaactcatcgatgtggaatcttagctccaaccccaggacatgagacgtccctcaagggagtgagttctactttcttcaactttggggacagggcggactgagatgtgggggacaggagggacagcaccaagggacatagccccagccaggtgatcctggaggcagggctgagtcctgtggcctcaggttacagccccagcactgtcacctgcctttttggtttgtttgtttgtttttaattgagacagaagtcttgctctgtctcccaggctggaatgcagtggcgcaatcttggctcactgcaacctctgcctcccggaggttcaagcaattctcccgcctcaggctcctgagtagatgggattacaggcacccaaaaccatgcctgactaatttttgtatttttagtaaagacagggttttgccatgtgggtcttgaacccctgacctcaggtgatccacctgcctcagtctcccaaagtgctgggattacaggcgtgaaccactgcgcccggcctgacacctgcctttgactgctgggttttaggaagtgacacccagcagctctgcaggtcacactgttttctagaggggtctttgcagaagcaaagagaaacaaatggcaacagtggtgatgataaacaccacaccagcccttctccctgaactcctgaggtatttctctgtcttgctttctctataaggacatctcagggcatctcaaactgaacccatctggaattgaggtcttgattgacaccccaaatgtgccatttaccctgtcttcccctgcatggtgatagcaattctttcagttgatcaggccccaaaccttggaataagacttaaatactacctaccttccttcctctctctccttcctttttttctctctttctctccttccttccttccttcgttccttccttccttctcttctcttctcctttcctttttttcttacttcctttccttcttccttcccctccctccctcccttcctccctttccctcttccttcctttcttttccctctcctctcctcttcttttctttcttgacagagtcttgctttgttactcaggctggaatacactggcaaaatcatgactccctgcaacctcaacatcctgggctcaagcaatcctcctacctcagcccctcaagtacctgggaccacaggtacgggccactacactcagctaatttttaattttttgtagagatgggattttaccatgttgccaaggctggtttcaaactactgagctcaaatgatcctcctgccttggcctcccaaagtgctgggattacaggcataagccactgccccagccgactcctacctttctctcatagtccagctctgtcagcagcacgtcctatcagcactactttcttttctgttcttttcctttttttaaatcccaatgggcaagcaatgacagtgaaactcacagacacatcagatatttttaaaaagcttttcttataggcacaatattttcttttcttctctctctttttttttttttgagacagggtcacgctctgtcatccgggctgaagtgcagtggtgccatcatagctcaccgtagccttgacctcctaggctcgagtgggtgtcctaccacacccagctaattttggtatttttcatagagatggggttttgccatgttgcccaggctgattttgaagtcctgggctcaacctcctgcttcagcctcctcccaagtagctgagattacaggagggagccacctatctcatctctggcccaagatatacatacatacatacatacatacatacatacatacatacatacatatatttaaagacaaagtctggctatgtcgctcaggctggagtggagtgcagtggcacgatctcagctcaccgcaaacttggcctcccagtttcaaatgattctcagcctcagcctcccaagtagctgggattacgggtgcataccaccaggccccgctgatttttttttctttttttttttttgcagttgcaagatttaatagagagaaaacaaagctcccattcaaagggaggggacccaaagggggtagccattgctggcttgaatgcctggatttatatcccgatcattgtccctcccgctgtgctctcaggtgatagatgattggctatttctttacctcctgtttttgcctaattagcattttagtgagctctctgattggttgggtgatttttgtatttttagtagagatgatgttttatcgtattggccaggctggtcttaaacgcctcacctcaagtgatccgccctcctcagccccccaaagtgctgcaattataggtgtgagccaccgtgcccggccccaagatgtattcttgggtgggtgtggtggtgcgtgcctgtggtcccagctacttgggaggctgaggtaagaggatgacttgagtccaggaggtcgaggctgcagtgagctatgatcgcaccatttcactccaggctgggcaatagaatgagaccctgtctctaataaacaaaacaaaacaaagccaaaaaaaaaaaaaaatcagccaggtgcggtggctcatgcctgtaatcccagcactttgggaggccaaggtgggtggatcgcctgaggtcaggagattgagaccagcatggccaacatagtgaaaccccacctctcttaaaaatacaaaaattagctgggcgtggtgggacatgcctgtactcccagatactcgggagactgaggcaggagaatcacgtgaacccccgagaccgaggttgcagcaagccgatattgcgccgctgcactccagcctgggcgacagagcgagactctgtctcaagacaaaaaaaaaaaaaaaaaaaaaaaaatcctgggctactttcgccccacctgctccgacctctcccggtccagccagccccatcacctcctgcctggtggtgcggtgaatggcttcggtcctggtccacccgctctgcccttacccctacggtcagttctccgcacagaggccagggggcgcccgtgagcacccaaatcaggtcacctcctttctctacggaggacctccccccaggaggccatgagcccccaaagaacctgcccctgtgagccaaagtgttttttattttcaggtgtcacgcctggctacattgatgtccagcataatattcctggggaacgttggggccccatgaaggcaaacaacccaggtcccagctctgtcttcctggtaaaagcaaatcaggccttgtccctcctaactctcaatttctcttccaactcaggaatgcagggcctggcctgtctcattcctagacacgccctgccctgctctctcctgttctctcgattccagtcacaccaggcctgtgtgtgtgtgtgtgtgtgtgtgtggatggccctgtgggggagtggttcccagatctccagcctaggggcctcttccccgggccttggctccaggagcccctccctgcgccctaacaagctcctgtcccttggcctgtgtgtccagggcctgccaggcgtcttcccctccacgctgcgggctatgggaagtggctcggtcagtttaatgagttgaatgatgccccaccctaaaatatatgtccacattccagaactgtgaatgtgacttgacttggagtaagtgtcttcaaagatgtaattcagtggaggatctcgagatgagatcatcctggattagggtggctggccccgaaatccaatgatgggtgtccttataagagatggaaaaggagaagacacaaagacacacagaggggagggccacgggacggcagcggcagagattggagcgatgcagctacaagcccaaggaggctaaggattgctgaaaccaccagaagccaggagaaagccgtcctcacttgttaatgccaggtacaggggctcatgcttgtaatcccagcactttgggaagccaacgcaggagaattgcttgagcccaggagtttgaggccagcttgggcaacacagtgagaccctgtctctacaaaaaatttaaaaattacgctggcatgatggtgcatgcctgtggtctcagctacttgggaggctgagataggaggatcgcttgagcccaagagatcgaggctacagtaagccctgattgtgccattgcactccagcctgggcaacagagtgagatcctgtctcaaaacaaacaagcaagctgggtgcagtggctcatgcctgtcatcccagcactttgggaggccgaggcgggcagatcacctgaggtcaggagttcgacaccagcctggctaatatggtgaaaccctatccctactaaaaatacaaaatattagctgggcgtggtgatgtgtgcctgtaatcccagctacttgggaggctgaagcaggagaatcacttgaacctggcaggcgggtgctgcagtgagctgagatcgcgccactgcactccagcctgggcgacagagtgagactctgtctcaacaccaccaccaccaacaacaaattacttgtcgtttgaagccacccagtttgttgtggcagccctaggaaacggaaacccacaggtgtgtttcctaggagactgtgagtttcacgagctccatcctccctcccctatgccagatggccaagttttctgcttggcgcatctcctgagcctagcactgaggtgtccctcaggaactgtgcccatagactagtctacagattgtgaagtagaaacaggtcccccatgccaggcgcggtggctcacgcctgtaatcccagcactttgggaggccgaggtaaggcagatcacctgaggtcgggagttcgagaccagcctggccaacatggtgaaaccacgttgctactaaaattacaaaaattagctgggcgtgatggtgggtgccggtagtcgcagctactcaagaggctgaggcatgagaattgcttgaatctgggaggtaggtgttgcagtgagctgagatcatgccactgcaccccagcctggatgacagagcaagtatcggtctcaaaaaaaaaaaaaaaaacaaaaagaaaagaaaaagaaaaaaagaaacaggtccctcaggaaagaggggctctcccggactgaatatctgcttctccctggtgggaaagctgaaggaattggggtatgggggtggggtccctggcaagggtggtggggactactagctgacccgagggctgggttatccttcctctgcacataccatgacatgaactatcgtaggaaaaatgttgcaggtcctcttgtctgaattactttgtcacttaattactcacttaacaaacactcaaagggtcagttccggggcaagcatcactctggcaactggtgatacagattattaggatgtagttggtgacctcaagggaactcacagttgccacaaagcgggggacattttttagtattctcctgccgttgtctctcctgccccactgacaaagagggaaggtgtctcaactaataatcagggagtttgagaaatcagcctctgcttccccttgggcaagtgtgatgtcaacagactatgaaagtactttcagccaggaggggtggctcacgcctgtaatcctagcactttgtgaggctgaggcgggtggattgcctgagctcaagagttcgagaccagcctgggtaacatggtgaaaccctgtctctactaaaatataaaaaattagctgggcgtggcagcatgcacctgtaatcccagctacccaggaggctgaggcaggagaatcgcttgaacctcgggggcagaggttgcagtgagccaagattgcgccactgcactccatcctaggtgacagagtgagactccttctcaaaaaaaaaaaaaaaaagaaagaaagtgctctcaggtctgtgggagagaagatgagtgcatgctctttaaggcctagtttttttgttttttttttttgagacagtgtcttactctgtcgcccaggctggagtgcagtggcgagatttcgacctcaggtgatccacccagctgagccttccaaagttctaggattacaggcgcaagccaccgtacccagccaaggcctagattttaatagagaatatagatagatgcttcttgtttgtgttgtgccatttttaggtgttttttttttctttctttctttctttctttttttttgacagagtgttgctctgtcaccgaggctggagtgcagtggcacaatcttggctcagtgcaacctccaccttctaggtccaagcgattctcctgcttcaccctccagagtaattgggattacaggcacctgccaccacgcctggctaatttttgtatttttagtagagacagggtttcaacatgttgtccaggctggtctcgaactgctgacctcaggtgatccacccacctcggcctcccaaagtgctgggattacaggcgtgagccactgcgcctggcccatttttagtatttagtggaagtttggtgcattgagatttcctttattctttcctttttttttttttttgagacagagtttcactctgtcaccaaggctggagtgcagtggggcaatctcagctcactgcaacctctgtctcctgggttcaagcaattctcctgcctcagccactggagtagctggggttacaggtgcctgccaccatgcccagcgaatttttgtaattttagtagagacggggtttcactgtgctggccaggctggtctgaaactcctgacctcaggtgagccatccgccttggcctcccaaagtgctgggattacaggcatgagccactgtgcccggcccagcttgacttttagatataatgtttcagtttttagtagagatggggtttcaccacattggccaggctggtctcgaactcctgacctcaaatgatccacccatggtggtctcccatagtgctgggattacaggcatgacctgctccgcctggcctggggcaggttttctgccaagtgctttagatatatttgctaatgttattcacacttgctctattcctggcctggataaagcgcttctcagggattagctgtctgagttctagctccagaagagtgagaaaggaggggctgcgatgtttgattagtcctgttatacatgggaagaaactgaggctctgaaaggttttgtcatttgtttgaggaaatgtggtgagcagaacttggacttggcacccccctaccccagaagctgggttcttcatcgctatgttcttttgtttcctaaatgcactaactcacccagatgtcacagcatctctatgagagctgcacttctgtttcccgtttcttctgtttttttttttcgagacagagtcttgctctgtcacccaggctggtgtgcagtggtgggatctgggcttactgcagcctctacctcccagtttcaagcgattctcctgcctcagcctcctgagtagctgggattacaggcacctgccaccacgcccagctttgtatttttagtagagacagagtttcaccacgttggccaggctggtcttgaactcttgacctcaagtgatccatccgcctcggcctcccaaagagctgggattacaagcatgagccaccacacctggctaatgctcagctaacgttttaggagggtggatcacctgaggtcaggagttcgagaccagcctgaccaacacggtgaaaccccatctctactaaaaatacaaaaattagctgggtgtggtggcgggtgcctgtaatcccaactactcggaaggctgaggcaggataattgtttgaacttgggaggcggaggttgcagtgagctgagattgcatcattgtactccagcctgggtgacagggcaagactccgtgtcaaaaaaaaaaaaaaaaaaaagaaagaaaagaaaagaaaagaaaagaaaaaaaacaaaagcaagcaatcaaactgggactcaaatccggaagcaagaacgatgtgagaggagtcaggggtcgccaaacactaatttagatcttcacacccagctgggtggacctgccagaataaaggtggggaatagcacaggaatgaggaagctctttatgttcacagcatcttgtgtgagaaaaaaaaaaaaaaaaagcggagtgtacagtatgtactccttgtgtaaaaaaagaaaaatgtattccccgcagcatctcaggaaaggcgcaggagagacggggaacattcgtatccagttcgggggtgtggaatcggatggtagggtgggagggaggactttcactctctgtatcctttccagtgttgtattgtgattacacagtcaaaaaataaaactgaaaatttagaaattgtgtttatgcttatgtaagcacagactcatctcttggaggaagcacaaaaatggtttttttaaaaaaggaaaaaaaggccgggtgcagtgactcacgcctgtcatcccagcactttgggaggctgaggtgggcggatcacttgaggtcaggagtttgagactagcctgggccaacatgatgaaatcctgtctccactaaaaatacaaaaattagccgggcgtggtggtacgcgcctgtaatcccagctactagggaagctgagccaggagggtcgtttgagcctgggaggcagaggttgcagtgagccgagattgcaccactgcactccagccttggcgacagaccgagactctgtctcaaaaatgagaaaaggaaaaaaaaaaaaaaaaatctgtgatgccaatgccagtgtctatagtggtgcagtaggatggggaacttcagggccaggggaaggatgggaggactcggcttttcaccataggccaaatggacctattgagtgctgttctatgattataaaaaaaaaacactgctggtattgtaatgcaggtgggtcaaagaatgagtcagttgcacacgtcctgtcatggaaggagctctgagacctgatcagagatgcagcatggaaaagtgaaataaatccattaaagaaagcccaaggctgagcctataatcccagagctttgggaggccaaggtgggagaatcgcttggggccagagcaacatatcaagatatcaagatatcggccagcgcaggttcacgcctgtcatcccagcactttgggaggccgaggcaggtggatcacttgaggtcaggagttcaagaccagcctggccaacatggtgaaacccagtctctactaaaaataaaaaattaaccaggcatggtagcacacgcctgtaatcccagttactcgggaggctgaggcaggagaatcgcttgaacccaggaggcagaggttgcagtgagccgagattgcgccactgcactccagcatgggcaaaagagcaagattccgtctcaggaaaaaaaattaaaaaaaaaaaaaaaaaaaaaggaaggtagaagtggctcacgcctgtaatcccagcactttgggaggccaaagcaggcacatcacgaggtcaagagatcaagaccatcccgaccaacatgatgaaaccccatctctagtaaaaatacaaaaattagctgggcgtgatgtcatgtgcctgtagtcccagctactcaggaggctgagacaggagaatcacttgaacccgggaagtggaggttgtagtgagccaagattgcaccactgcactccagcctaggcaacagagcaagactccatccccctccccgcaaaaaagttaacatatcaacaaatcatctctacaaaaattagacaaattggctggttgtggtgtggagtgcctgtggtcctagctactcaagaggttgagaggcgggaggattgcttgagcccaggagtttgaggctgcagtgagctatgatcctaccactgcactccagcctggacaacagagtgaaatcctgtcttcaaaaaaagaaattaaaaaaaaaatcctgagtgcggtggctcacacctgtaatcccagcactttgtgaggccgagggggcgccgatcacttgaggtcaggagtttgaggccagcctggccaacatggtgaaaccccatctctatactaagaatacaaaaattagcctggcgtggtggcgcacgcctgtaatctcagctacttggaaggctgagaattgcttgaacctggaaggtggagatcgcagtgagccgagattgcaccaccgcgctccagcttggatagagcgagactctgtctgaaaaaaaaaaaaaaaaaaaacaagcccaagactttgggaaaagtttgcatgtgggtgcaccagatatccggccaagatagacaagccaagtagtggcctttgagcaaaaaaatgcatgtgtgaaaggtctttgggcccttttaccaccaagattttcccctcaaaatcccaccgtcccactcctcacactgctacctggtaggttgcttggccgtgttttttgtgaagttcccagaattgtatatacctcaaggcttcgtgcacctttatgtttgtgacacttcagtatgaagttcacagggacttggtgtataatggagacttgggggtggggatggcagccctgggatttgtgtcaccaatgaggtcaggtcagttccgcaataaatgtgaccttggcgtgtgggatactttggtaaacatctcttagctcttgatattccagggtcacctcctgattgggctggcgtctcctggcttaatgtggctgctcttcaaagtcacccctgcaatgtctttagggaaaagccctctagacttgacttgtccaacagttgccactggccacatacatgtgtggctgctaagcaactgaagtgtggcaggactgaggaactgattctaattttattgaatttgtaagatgtttaagtaaacggtatatagaacgttctagtcattgcagaaagttctcctggactggcagggctgcccctagcctgttttcagcgcttcaactgtttcagtgggaagggaaagcaactcttagcttgacacttttttgtgagacacagcctcgctctgtcacccaggctggagtgcagtggtgggatctttgctcactgcaacctctgcctcccatgttcaagtgattctcctgcctcagcctcctgagtaaatgggactacaggtacgtgcaccacgcctggctttttgttttaatagagacggggtttcaccatgttggccaggctggtctgaaactcctgacctcaggtgatctgcccgccttggcctcccaaagtgctgggattacaggtgtgagccactgcgtctggcccagtttgacttttggatactgtgttttagtttttttttcttgatacagggtctcactttgtcacccaggttggagtgcagtggcacaaacacagcttgctactgcctccacctcttgggctcaattgatcctcctgcctcagtcccataaatagctggccctacaggtgtacgctgcattctccggctgaatttttaaattttgtagagatggggtttcacaatgttgtctaggctggtctcaaactcctgagctcaagggatctacccaccttggcctcccaaagtactgggattacatgcctgagccactgctcctggtctatatacagtgtttccactttagaacattttgtaacaaagcagcaatacattgttttaagcctgagcaattactttataataaaaccagttattttaaagaaagttacaaagtaaaagcagctttagtagcctgcaaataaagccaaggcaggaaatgggtcctctctacagtggggctagtcctgggcaggaccttgagctccggtttggccagccttcaggacgcccagcccgttctagcagggaaggagtgataaggaattaagaggccagaccctgggttggccccttggccccagagccaaggtctgctgaaaaagccagggaccctgaagaaaggcagaattaggagccagaccctgcctctccccaccgctactttgactccaaccttcatcaaaaaatgatccccaaggccactgtgcttgggtctctggttttttggaccccgagtctgggtagaagttctccaacccacttatggctgaggaagggagacttacgtttcccttgcagggcacttgcctcctgcccatcccaccctctcaccttgattgaatttggaaggatgcccagctccccactccacccccaaaaccagcagaaccctcaaacagagtcacaggaccgctcccctgaggtttagcatcagtctttaatgctgtcgcacttcattgactagtcacacactttggtctcatgttggcagtggcaacttacaatgagtctaaaggtctgagcactggactggcctccagggaacagacatttgttccaactccccttccctccccaagatttcttcagaattccattatggccctatacagagagcactggctgccggggacaggttttgagtgtacaccaactatacatggaattataaaaacatatttacagacgttccacagtgctcctgtaatcagaagcaaagacccttttatcaaaagggattgtatctagggctgtgcaaaattcaaaaggatcagatccctttgaaagagtccatagtccatgaaacaaaaaattacctgggccactggtaagccccacgtgtgccaagattgccttacagaaatgtaaagagtgtgacccacaaagtgaggacattcagcttcactggagccagaggtcaggaaggccccttgctgaggccaggctcccagaccatcaagggagaggtggctgcacttgctggagtcactcactggaggctggctcccttggtcctgctggaacgagaggtattgcttgtggacgccaaccaggcagttctgcaggaatagtttaggttctcaatttgagatggccaaagagaagacagaattctccaggagaagagcaagacatgggagacaaatacagaataaagcacaaactgatcacacaacagaaaaggaggagtgtacagggtctgggaatcaagactgcaggttgacattatctaccagccagaagcaaaaagacacagagggatcaagtccatctgctggtctgcctctcacccctggccagggactggaggtggatgtgggcccatcccgggagggctgccagacccagtggggcagactggaatgccttttcctgctgttcccaccacctgatgccctatagctcgaaaaaccactgaagtctagtgtgcgactttgaaagattgtaatatatgctctggaaaacattcagcagtacgaaagccctccctgggccctcccaccctctcatggtccacaactggtagaaaggtccagaaatccttgagctctggaaaggtccctggtcagtccttggggagctcagatagctatattggaagaacctgctcaagtacggttcttgatgtctggggaatcctttcggggaagatcacttcaaactcaataatgaggtccccacgtttctcgggtgttttggggagggggaggccttctccaggaacttttcgccgcatgccaggcctgataacatctttgaatacgacgggtatcgtcctgccgtccagagtggggacgttcactgtgcagccacacagagccttgaaaagcaaaaggacagcattagatggaagctggctcaagaggctcagctcttgcccagaggccgtctgccatagataagacccatcaggcctctgcagctaagacctggcccccaaatctacacgtccccaccacgaaagctccacaacagcgccctggtcagtcctgttcactgttgtgccccaagcctggcacgcaccacacaccccaacacattggttcagcaaatactaaactgcttcaaaaagcagccatcgccctctacagacaccgccccacctggcaccttacctcccggaggctgatcctggcaggataaatgacatcagagccatctctcttaaagatattgtggggcttgtcctttaaaacaaagacgatatcagctggaatgttgttggaggtctggtctccttccttggggaaagtgattttggttccttctttccaccccttcttcacttcgatggtcaatattttgtcttcgtttcgaatgctctttccgtcggggtttagccgcttgtgggagattttcatcttcttggtacagccgctgtagatctcttcaagggagactcgaaggtcgtgggtgactgggggatcttgcttctttcgggcgggctcttgggcagagcgggagcggccaaagttcacgttggtgaagccacccatgcccatagggaagccagagaatgggtcatcaatgtccatgccttcctccccgttccgctgcccaaaaaaggtgtcaaagggatttctgccaccgaagaactcagcaaacatggcatgagggtctccatggaatgtgtagctgaaagaggtaccattggcaccaccgccgctaccgccactggggccactcccctttaggcctgaaaagcagatttagaagcagtcagatggctgaacagcagactctctctcgagcttcccttacagggggaaacagcttggaagccatgggggaggaacttttttgtctgtcaggggagagcaaggaagaaccccaagtttctacctctcactgccaacagcagagacgcccccctaccaacagtatttccgcgtagcctgacagtggaaaaggactcatgcggttaggtgttcacctccaggtgccacctaggccctgccactcctggactgacccatcctcctggcaacatcaccaagagatggctaaagacacatggtccagggtcggctttcggtaagtgtttactctcaacgttttagggctaatggtgcgtaggaagagaagaaaaaaaaaaacaaaaataaatagggagtttttaaatcctcacacattagcattcactgccaccatccttgcacaaaaagtcagctccagatcaagcccagaagccagcctgaatcatcaacgggcacaggaacaaaaagccctgctctccttaccctccgaggcggccccgctctccggacctgggcggccgctgcctcctgcgtgccctgccggggccaggtcatcacttcccgggaattatcccaacccagcccccaagcccacgaacggggtcggctcctgcattcacaacccctcgccccgcagctgagccggaggcgccgccccgcggaccccggcggccgagcccaggtgagcccgggtccgcagcgggctccgccgcgccgtccccgtcgtcacccccggctcccccacccccatgcaccgcaccccggggctgctcggggccgcgggaggaggcgcccggggaggggcagccccagacatgctagaagcttctggccgagcggctgggccaaggctcctcctcccaccgcgcggccgccaatccgagggcggaggcccgcgaggccggagggcggggcagctcggccccacggcccggggcgtccttcccggggggccgccgagaggggccagcgtgcctcagtttccctgtctgtcaaaaggcggggccgcgcccctggccgcgagcacacaccttcctccccgtagcggtcgaagatctcgcgcttgcgcgggtcgctgagcacgtcgtaggcctcagcgatctccttgaacttctcctcggcgccgggctccttgttcttgtccgggtggtagcgcagcgcctggcggcggtaggcccgcttgatctcctcgtccgacgcgccgcgggccaggcccaacgtctggtagtagtctttacccatgaccccctcctgcggcccgccgacccgctgtcgccgtcccccggctccgccgccgaccagtcccggactctatatacccgtccggcggaagcttccagagcccgccagccccctccagaaccttccgccccgcccgcccccgcggcgccggccaatcgccgccgccctttcagcgacacgcgacatccggggcggggcctcgccgtcaacggccgcccgcgcggggccacgccccctcccgctccgccctcggcaacacctccccgcggcgcgcgcgcacaggtcggaggaggccccgcccacctttcgggacgagccaatcgcgaccttctttccctctctacgcggccccagctaccctgcgtcccgccctccgcctgggtcagtaggtcgggacccacagcgaacttgctgttccaggaaggggtggggcctgggactacccagtcctttccccgggaggcgatgaacctgctcgcccttgtctcgtggggcctgcggtgggctcccgcccggtgacgccggacgaactacctaacctgtgtctgcctaacccaggggcccccttctatctacaacatggcaataagagaacctatcaggccgggcgcggagcctcatgcctgtaatcccatcacttcctgaggccaagacaggaggatctcttgagcctaggagttggagaccagcctaggcaacataaggagactccgtttctatttaagattaacaaacaggccgggcgcggtggctcacgcctgtaatcccagcattttgggaggccgaggcgggcggatcacttgaggtcaggagttcgagaccagcctggccaacatggtgaaaccccatctctgctaaaaatataaaaattacccgggcgttggtggcacgaacctgtaatcccagctactcaggagattgaggcctgagaatagcttgaatcggggaggcggaggttgcagtgagccgagatccggccgttgcactccagcctcggcaacagagcgagactccgtctcataaataaataaaataagtaaaataaagtaaaatgaacaaaaaacccaccagcgctattctcccaaccgtggggagaaggattttgggacggaagactgcctctgttctcacctcctaaagcaaggtgaggatctggacggaagcgcatctcccaaggtcctcccagtcccgccttcttccctttactgccctctcaagatcacttgccgctaaatttgaaatttatcttgtctcttggctttcaatgtgtcttccctcccagtctgacatcgccacctgggcaggggccaggtcctgtctgcactgggtccccagtgcctggaacgcagtgagaacctcataaatattccccgttcttacacacgtgcttctttttcttccccaactacctttataatttggggggacataggtgtgtcacacacctttcaaggcctctgtttcctcaattgtaggcaacacgatcgcgtttggctctgaaagtctggggtgcctctgtcaaggacagagctgatgggaaaaggaggctcagaaaggggttccacctgggaagggcccagggaagtgggggaggttcctggaagaactgcctgggaggtcagagccatgtaacactggctctggaaccagacagctgggcttcattcccagctccagcatttcccggctgggtaaccttgggttagttactaggcctttgctggccttagcttcctcatctgcacaatgaggaatgaggatagcagttgtgcccacatcatgagggctttgaagtttatatgagtcaacatttgcaaagtgctcagagcaggcatggcacaaaggaagcattgtcaaaggggtgactaaccattttcttagtggtgggctcttcagccatcacctcattcctggcagctaaaagattccagtgacagctgcccctgggcagacagggactcctgaagaagaagaccatcctcctgcctcctgaggcgggaggatctcttgagcccaggaatttgaggctgcaggcagctatgattgtgccactgcactccagcctgggtgacagtgagaccctcagcctccccataaaaaagttacataaataactatcaggagcatcatggcggatagttacataaataactatcaggagcatccagcaggcagatctggttctcttggcccactcaatgatctctgaggtaactgcatcagcaagaactctggactagaactggacaacccgggaggatggggctgaaattccctagacatcgagaaccatacttgagcaggggtcctgaagcaattatggggagagagaacttgatattttttaaaaagttactaggctgggcacagtggctcacgcctgtcatcccagcattctgggaaggtgaggtgggaggatcttttgaggccaggagttccagcctgggcaacatagtgagaccccatctatacaaaaaattaaaaataaaaaaaattagccgggtgcaatgatgtgagcctgtagtcccagctactcagtggaccaaggtaggaggatagcttgagcccaggaatttgaggctgcagtcagctatgattgtgccactgctctccagcctggatgacagtgagatcctgaacctccccataaaaaaattatataaataactatcaggagcattatggggaaaaactcagagcttgtgactttataaactagtattttataatataaatttaatttagaattacaagtgcagcagcctccaaaggctttaacatggctctgggtgggcctttctggttgttctaaagtttcttgccataggccaggcacggtgactcaacgcctataatcccagcactttgggaggctgaggcaggtggatcacctgaggtcaggagttcgagaccagtctggccaacgtggtgaaaccccgtctctactaaaaatacaaaaattagtcgggtgcggtggcaggtgcctgtaatcccagctacgctggaggctgaggcatgagactcgcttcaacccgagaggcagaggttgcagtgagccaagatcgtgccactgtgctccagactgggtgacagagtgagagtttcaaaataataataataataataataataataataataaaagtttcttgacacactggaggggaacattttgctaaaaacactgcggaagggatgtctttgtgcttggggtcagtgttagagctgggaactctcccctccttgagtaagcctgggtcatgttcaggaagttttgtttgtttgttttgagatggagtttcactcttgtagcccaggctggagtgcagtggcacgatctcagctcactgcaacctccgcctcctgggttcaagtgattctcctgccttagcctcccaagtagctaggactacaggtgcttgcgaccatgcctggctaatttttgtagttttagtagagatggggtttcaccatgttggccaggctggtcttgaactcctgacctcaggtgatcaacacgccttgatctcccaaggtgctgggattacaggcgtgagccaccacgcccagccagttcgggaagttttaatttttttttttttaatcagttctaggagccaggaaattaaacaaacaaacaaacccagtaactctctcctaatggacatggtactgtgacctgaacactcactgagaacttcagaatattactgaaaaaatggcctctgcgtcaacttcagcagatattgggctcttaacttggaaaagctgttatagttgtttgttgtgtcagcgtggctaagctctagaacctagttattcaactaaacactaatctaggtgttgctgtgaagttattatgttgatgcggttaggttagcacgtctacagttgcttgactttaaaaacaggacatgaccctcaaggatgtgaggatgtaagcgggcctcatccaatcagtctagagactttaaaaagccaacactgaggccgggtgtggtgggtcacgcctgtaatcccagcactttgggaggctgaggcaggagaattacttgaacccaggaggcagaggttgcagtgagccaagatcaggccgctgcactccagcctggtgacagagcaagactctgtctcgaagaaaaaaaaaaaaaaaaaaaagccaacactgaaagcaaacactgaggtttcccggcagaaaaagcatcagctcctgcctaagtttccagcctgctagcccacccagcagattttggtgttgtctagccagcccccacaagcatgtaagccaattccttgaaataaatctctgcacacaaacacagacacacacacagacacacacacacacacacacacacacacacacacacacacacacacactcctactggctctggctctgtgtctttggtaaaatcctgactgatacaggaactatgcaagtgagtctgaggacagttgctttagttcaaatcctggaccaactgtttccttatttcctacgtgtgtgatcttccacagcctgcttgatctctgggagcattaggtctgtcctccataaattggagataagagtagattaggccgggtgcggtggctcatgcctgtaatcccagcactttgggaagctgaggcgggtggatcacttgaggtcaggagtttgagaccagcctgtccaacgtggtgtctctactaaaaacacaaaaattagctgggcatggtggcatgtgcccatactcccagctactcgggaggctgaggcaggagaatcgcttgaacctgggaggtggaggttgcagtgagccaagatcacgccactgtactccagcctgggcaacagagccagactctgtctcgaaaagaaaagaaaagaaaagagtagattttacgctgctggtgttgctatgtggatgaaattgagaggaaatgaacaggaagtgaacaggaaatgaacattataataacatttttatttttatttttgagatggagtctcactctgtcacccaggctggagtgcagtggtgtgatctcagctcactgcaacttccgcctcctgggttcaagcgattctctgcctcagcctcctgagtagctgggattataggtgcctaccaccacacctggctaatttttgtatttttagtagagactgggtttcaccatgttggccaggctaatctcgaactcctgatctcatgatccacccaccttggcctcccaaagtgctgggattacaagggttgaaccctacacccggccttgtttttgtttttttttttttttgagatggggtctcacactgtcacccatgctggagcacagtggcacaatcttggctcactgcaacctccacctcccaggttcaaatgatcctcctgccccagcctcctgagtagttgggatcacaggtgcctgccaccatgcccggctaattttttgtattatggttttggtagagatggggttttgccatgttgctcaggttggtctcgaacacctgagctcaggtgatccgccggccttggcctccccaagtgttgggattacaggcataagccaccatgtctggcctataataacatctaacactgacatggccaagcctgttccaagtactcgatgaatattaactcatatacttgtcacaacagccctatgaggttgggctatcattacacccattttacaggtggggagatggagattctgagaggtcatgtgacttccccagggtcacccagagagtaaaatgctgaagtgtttagcatactgagtgcttacagtagacactcagcttgtgtataatgtgactcagatgatcataaagccttaattttaagaaaattgcattactcctgtcttcagctcttcacctgttgaaaaaaagaccttcaggccaggtgcggtggctcacatctgtaatcccagcacttttggaggccaaggcaggaggatcacttgagcccaggagttccagatcagcctggcccacatagtgagaccccatatctgcaaagaatgacaaagaaataagctgggcatggtggcacgtgccagctacttgggaggctgaggtgggaggatcacttgagctcaggaattccaagctgcagtgagctatgagtgtgccactgcacactagcctgagagacagtgagaccctgtctcaaaaataaataaaaatccaaataaatttggaaaagatcttcaaggctgggtgcggtggctcatgcctgtaatctcagcactttgggaggctgaggcaggtggatcccttgaagtcaggagttcgagaccagcctggccaacatggtgaaaccccatctctattaaaaatgcaaaaattagtcaggcatggtggcgtgcacctgtaatcccagctatttgggaggctgaggcaggagaatcacttgaacctaggaggtggaggttgcaatgagccgagatggtgccactgcactccagcctggacaacagagcgagactcgttctcaaaaaaaaaagaccttcaaaaagcgctatagccatatgagccaacaatcccactcccagtgggatacccatgtgaaatgaaaacctttgttcatatataaaaattcatggctgggtgcggtggctcatgcctgtaatcccagcactttgggaggccgaggcgggaggatcacaaggtcaagagatggagaccatcctgaccaacatggtgaaattccgtctgtactaaaaacacaaaaattagctgggcatggtggtgcacacctgtaacccagctattcgggaggctgatgcaggagaatcgcttgaacccagaaggtggaggttgcagtgagccgagattgcgccactgcactccagcctgggtgacagagcgagactccatctcaaaaataaaaataaaaaagatactattataatgttcatttcctggctcctctcaatttcatcaacatagcaacaccagcagggtaaaatctactttttttgtttttttttttgagatggagtctcatgagcgaatgtttgctgaggctttattagttattaccaacagcagttaaaccctaactgtccttcaatggatgaatggataaacaaatgggatccatccacacaatggaatactattcagctataaaaaggaatgagctacggatacaaaaaaacaacattacagatgaacctcatatgcattatgtgggtgaaagaagccaggctcaaaaggctgcatgattccatttcactcaaccttctggaaaaggcaaaagtatcaggacagaaagcagatgaatgcttgccaggggctgggacctgcaacaaatggagtagtttggagaattttttgggttggtgtaaatgctctgtatcttgattgtagtggtggttgcatgaccgtatgtgttcagagctgtacactaaaatgggtgaattttactacatgtcaattacacttcaatgaaaaaaaaaaaaagaaggagaaaaaccaaacaacccaggcaagacaggatagggcttgggaaacctctctctgggattcctgacacagcagaaacttgctaacgagccctggcttgtctagtcccagcttcacctcccctcacacacccagcgagccagctcattcatacacaacccaaaccagccaagccaggttctggaaaaagtcaagatccgacctgatctgcccatgggaaatacaaaaggagcttgtgagacacgacattaccaaacacatcacatctctggcattcaaatggtctcgggttccccccaaacctgaggtccagaaaagctcatccttggaagctgccgcagcttaggccgtctcttgcagtttctcccttggaaattactttaataaaggagctagttaccatcagctcaacaacgacccaacagatctaccagtcaccattgtgaatcagccactgctgggactgtgaagggaccagcaggatctagctgtccctacagacaggcactgtcagggggccacagtacagtgtcctcagtggcttgaacaaagtggccagtcttcattccaagggtgggtttcatttctgctgacagcctggttaccggaagccagatgggcaaacaaggggttcctcaagcctgcaacacccctcaaaaacaaagaggaattctactttggaggctggatcttgcctttctgccagcttcttatgggtgaggagggggtggaaattatttgtatgttccggttgacacgcagcatagtaggtgcatgaggatgatttggtgcctgttgagtaagtgtggggctcagaaaagcagtctcaaaagggaatttccaaaacgttctgagtttatgggaatatgtatggaatctcttcaaaatgacacctacttgtacaccatcatgccctatctaactgcaacccagagatggaagactcacctcttcagatcacattaaataagttgaaaatttgcataactggtgaaggagcaacacatggatgggtcttagggtttcaaccctatccccatggcccctcacaatcaagtacctcaggtaactcaatctgataggattttaactgtggtctcaggccgagtgggatggctcatgcctgtaatcccagcgctttgggaggccgaggagggaggatcacttgaggccaggagttccagagcagcctgggcaacataatgagatcccatctctactaaaaaattaacttgtggcctggaagcaaatactctcccccagcacccaagaagggcagggagtgaggcctgtcatgacacagaaggcctcaaaactcaaactgccaccagaaaaatatctctgctttttttttttttttttttttttttttttttttgagacggagtttcattcttgtcacccaggctggagtgcagtggtgtgatctctgctcactgcaacctctgcctcctgggttcaactgattcttctgcctcagctacttgagtagctgtgattacaggtgcccaccaccacacccagataatttttgtacttttagtagagatggtttcgccatgttggccaagctggtctcaaactcctgacctcaggtgatcctcctgcctcggcctcccaaagtgctgggattacaggcctgagccactgcgtccggccagatccttgcttttgaaagcacacatacagaacaccttcaggttttcatctgtttttcccagatagcaccagtgaaaaagataatgagtttccagaagaccacatagcgttggcttcctgtactcgcagtcagggatccccaaaggctacagcttcagaagtttccagagccaaatctggatgactgagttccaagcactgactcacccttgcctccgcctgctcccctgtgaatcagtgatctacctttaaggacttctcatcgtgtctctcatgacaggcctgtgaattccagatggttcaacagctcatgaaagctcaggggcaggatctggaaacaagagtaaggagaggaggtgaagaagtgtgccaggtactgcctgttcctttgtctgtcaaaagtcttttctttttttttcttttttttttgagacagaatctcactctgtcgcccaggctggagtgcagtggtgcgatcttggctcactgcaacctccacctcccgggttcaagcgattctcagcctccctagtagctgggattacaggtgcccaccattacacctggctaatttttgtatttttagtagagacagggtttcaccacgttgtccaggctggtcttgaattcctgacctcatgtgatctgcctgtcttggcctcccgaagtgctgggattacaggtgtgagccaccgtgcctggccagaaatttatgtgtttttcatttacagcacatctcaatttggaccagtcccatttctttttcttttttctttttttttttttgagacggtctgttgctcaggctggagtgtagtggcgagatcttggctcactgcaacctccgcctcccgggttcaagcaattcttctgcctcagcctcctgattagctgggactacaggtgtgtaccaccacgcccggctaatttttgtatttttagtagcgatgaggtttcaccatatctgccaggctggtctcgaactcctcacctcgtgatctgcccccctcggcctcccaaggtgctaggattacaggtgtgagccatcgttcccggcctggaccagccccatttcaagggctcagtggccccattggagccactagacacgattctggacgtcaggcagagaccaatgtagttcccctgtccatagggcggagcaaagtgtggaggggggccgggcggggtggctcaggcctgtaatcctagcactttgggaggctgaggcgggaggatcacctgaggtcaggagttcaagaccagcctggccaaccatggggaaaccccgtctctactaaaaaaaatacaaaaattagtcgggcgtggtggcgggtgcctgtaatctcatctacttgggaggctgaggcatgagaatcgcttgaacccgggaggcggaggttgcgtgagccgtcattgcgccactgcactccagctgggggacagaacgagattgtttcaaaaacaaaacaaaacagaaaaacaaagtggggcggggctttcattaaaaacggcagtgaagccaccccagaatggggctggggctcaaggttcttgcaggttgggggttcccaaatggggagcttttcgcgactccgtttcgcctttccttccctcccactcaagagtctcctcccatagtgacctcctcgccaaccagactccgcagcccgcgaccccagcccctagccctctcctgctgttcccggtgtaccccgggggccgcccacctcagaatttaccccttcggcgccgcctgtcatgtggatgctgccttgcctgtcactcaacttcttaccccgcccccgcgtctggcctaaccgtcgcttaccttggtttccacagcgacgccatcagggggcgtggcaaagggacgcgcggggcagagacctcctttggattggtggatggtcaagccccttctctttagcccctcctacaggcgttccgcccccttcgattggtctcgcaagttgattggtcaatcccctggtgctagtcctagtcttggttcggaccggccccaaggagcaggggcgaacgtgggcgcctcgtgccctgattggccgacggggcgcgcgcggcctggaggggcggggcggacgcagagccgcgtttagtctatcgctgcggttgcgagcgctgtagggagcctgtgctgtgccgcgcagttaggcagcagcagccgcggagcagtagccgccgtgggagggagccatgaagcattacgaggtaagaagcgagaaacaggggccgtgtggccactgctgacccattctttttccttctttgcgggaccacgggaccccactttctggtcctgtgccccgaaggaagagccagacggcgcaggcgcagtgggcaagcgttgcgccccgggccactcgtaaattccaatgcgcatgtgcgcaggaagtatttataaatctgcaacccaggctgttttgggggtactttttcttgggggtctctgcaggggctgggacgcttgcaggttccttgcagctcccccagcgggctgagttgcagactttgtcatgggagccacgaaggtgcgggacccttgctcccaatccgagggagtcttgcacaaatcttgcgccacgccgccgtcaccagcgtaggaaggggctttgctatcagtattcttgtgtacgacctttggaccccttccctcgcccgggacgttcccgggagacttaggcggtgagggaggtgcagctccacggctggctttcgcagagcagcgaagctgatcttgctttctggttatcaaagaggtcatctacgtcaacccttgggtgtcaccaaggagaaatcttatacccacccacagccactcttgaagcccaagtcttctgactcctaacttgggtctctttttcccttaaaacgaagtcttctgatgtgcttatcgccctaggtgataatataatattaataattcaaccaattatccctgaattattgctgacttttaagtaactatcatcaaataataaaatttgttattaaaattcaaaataacaatttagcaagtgcttactcttgtgctggtgagattctgttaccttgtataagaactattattattcctgtttgtaaggatgaataaagtctcagagatataaagtgacttgttcaaaggcccctagttagtaaatgcaaaacagataggggaactcaggacgccaaggtcttagttcctagccactatgccatgctggtcctcaaatgaaaaatagcaggtcgagcgatttcttgtttctcacttcccctccaatttaaaaaattctggcaaaatacacataaaatttaccatcttgactatttttaagtgtgcagttcagtggcattaagaacattcacattgttgtgcaaccatcaccaccacccatctccagaactctttgcatcttggaaaacagaagctgtagacgttaaatactaactccccattcctctccacctccacctctggcagccaccattctactcagccaccattccgtcttaatgaattgactactctaggtaccttggatacgtagaaggattttttttttcttttggagacagagtttcggtcttattgcccgggctggagtgcaatggcgcgatctcggcctactgcaaactccgcctcctgggtttaagcgattctcctgcctcagcctcctgaatagctgggattacaggtgaccgccaccatgcccggctaattttttgtatttttagtagagatgggggtttcaccatgttgaccaggctggcctcaaactcttgacctcaagtgatttgccctcctcggcctcccaaagtactgggattacaggtgtgagctagtgcgcccggctgtttgtttttattgacaagttgaatattactacctctgcctcctgccccctttattgctactatttttggaaatttacccacaatcctttgaagcctttttttgagacggagtttcgctcttgttgagtacgctggagtgcaatggcgtgatcttggctcaccgcaacctccacctcccgggttcaagtgattctcctgccccagcctcctgagtagccggaattacagtcatgagccaccatgcccggctaattttgtatttttagtagagacagggtttctccatgttggtcaggctggtctcgaactcccgacctcaggtgatccacccaccttggcctcccagagtgctgggattacaggcatgagccacggtgcctagccccttagaagcctttaacccacaaatcctgtaatttttgacatggtatcaagaatgaggaggtttgtattcaataatctctgtcatttaagttttcattctagaatgaagttctgatgtggattcccctctcaaactctatatctaaacctgtagtcccactactgtagtctcagctactcgggaggctgaagcaggaggatggcttgagcccaggaggttgaggctgcagtgagcccaaaaatcaggccactgcactccagcctgggcaacagagaccctgtttgaagaaaaaaaaaaaaaaaaaaaaaagctaccatgtccagcttgaaacatgcagtttggaacatccatatggcattttgcaaatgtagttggtttagttttgctagttaacagtcagataaagtaggcctctgagcaccctgggggtgcgtgcttttgttccaggaagctgggcacagcctgaggcccaagacttggactggagaatatgctccaccgtacttaatccttttctctcccagaaagaagggggagctttggccaggcatggtggctcacgcctgtaatcccagcactttggtaggctgaggtggccggatcgcttgaggtgaggagttcaagaccagcctggctaacatggagaaaccttgtctctactaaaaatacaaaagtgagccgagtgttgtggcacacgcctgtaatctcagctacttggaggcagaggttgcagtgagctgagatcatgccactgtactccagcctggatgacagagcgagagtctgtctcaaaaaaaaaaaaaaaaaaaaaaagggaagcttcaaactcactgttcaaagtgaccttgaaggaaaaaataaattgttattttgctgtgttgtttgttattctctgccaacctttgccaagtacccatagaggcgatagctacagggcttctgggtgggagaagcagttgtttcccggcccagcggattgcatagcaagcagattagtttaactgcatgtgtgtattgtaggtcagtaaaaatagaaaggatgctttcactcacacttaacaagcaatttgagaaaaggtttgtctacatcaaagaatatatttctggccgggcgaggtggctcatgcctgtaatcccagcactttgggaggctgagacgggtgaatcacttgaagtcaggagttcgagaccagcctggtcaacatggtgaaacctcgtctctactaaaaacaaaaaaattagctgggtatggtggcacgtgcttgtagtcccagctactggcttcgaggctgaggaatgagaatcacttgaagctgggaggcggagttgccatgagctgagatcacgccactgtactccagcctgggtgacagagcgagactctgttttaaaaaaaataaataaaggatatatttcagctgggcacagtggctcatgcctgtaatcccagcactttgggacaccaaggtgggcaaatcatgtgaggtcaggagtttgagaccagcctggccaacatgatgaaactccgtctctacaaaaaataaaaaattagctgggtgtggtggcgcacgcctgaaatcccaggtacttgggaggctgaggcaggagaatcacttcaacctgggaggtggaggttgcagtgagctgagatcgcaccactgcactccagcctgggtgacaagaacgagactctgtctcaaaaaaaaaaagaaaaaaatctatttctgcttgggactaaatccatcttcccaccctcaagcagtctgttgtccactgaaaggttggcccctggagagaccttggagattatgaagtgcagtttacaactgatagaggtaatgcccagaggggtgcaggacgtgctgactgtcacgcaacaaattaatgtctggttgaggactgttatcatggcagttgggatcccagcagtagtggagatcggtggctgtttccatagtagcctcatatcactgccaaatctcatctgatctgagaggaaaagttttccactctgtggcctaattgaggtgaagcctctctctagaacgggtcacctccaggccttggctgaagccgtcttcttagaataccagagcaggccttagcattgtcttggggtcagagctaggtcggtaagcgaactgcttatcctaggatacagtatttttttaatgtatttttttattttattgctgtttttgccactgcagatgagactcaaagcaatgagcccagcagcaactggaaaaacagctactacatcttgtaattgagcctgttaattcctgagaaaatcagtctgtcttcagcctccagcagtccaggtcactgcccatttcccgcagctgaatacccagaagcgagcctcttggggtcccccataacccacatttagggtgttttctttctttttttttttttacacagagtctcgcactctcgcccaggctggagtgcagtggctccatcttggctcactgtaagctccgcctcccgggttcacgccattctcctgcctcagcctcccgagtagctggaactacaggtgcctgccaccatgcctggctaattttttgtatttttagtagagatgaggtttcaccgtgttagccaggatggtctcgatctcctgaccttatgatccgcccgcctcggcctcccagggtgctgggattacaggagtgagccaccatgcctggccttttttttttttttttttttttttttttttgtgacagagtctcgctctgtcacccaggctggagtgcagtgatgtgatctcacctcactgcaacctccacctccccggttcaagcgattttcctgcctcagcctcccaagtagctgttattacaggtgggtgccaccatgcccggctaatttctgtagttttagtagagatggggtttcaccatgttagtccaggctggtctcgaactcctgggctcaagcgatcctcctgccttggcatcccaaagtgctgggattataggtgtgagccaccgcaccttgcccaggggtgagtcttattagcacctgatcagatgggaactactgttctactttacagataatgcaactgaagctcagagaggtaaactaagctggtcaaggtcacagagcctggaagccagggagctgaacctgggtttgtcagactccagttttgtccacactgatggcttctctgctgatgctgccctaggacagctggtggctctcctgctgtgttctgaggacagagcatccctgaagggagggcgaggtgctgcgggtcagtgtggactgctgggagagggtctttctctgccctaaaatcggatgggctgccccttgcagtaagggcaggattgagagtgatgagccttgcctgggtgcagtggttcatgcctgtaatcccagcacgttgggaggctgaggcaggaggatcacctgaggtcaggagttcaagactagcctggccaacatggcgaaaccccctctccactaaaaatataaaaattggccgggtgcagtggctcatgcctgtaatcccagcactttgggaggccgaggtgggtgaatcacgaggccaggagatcgagaccatcctggctaacacagtgaaaccccgtctctactaaaaaatagaaaaagttagctgagtgtggtggtgggtacctgtagtcccagctacttgggaggctgaggcaggagaatggcttgacccgggaggcggagcttgcagtgagccgagatcgcgccactgcactccagcctgggcgacagagcgagactccgtctcaaaaaaaaaaaaaaaaaaaaaaaaaaaaaaaaaaaaaatatatatatatatatatatatatatatatatatatatatatatatgtatgtatatataaattagccaggcatcatggtgcactcctgtaatcccaggtactcgagagactgaggcaggagaattcgtttgaacctgggaggtggaggtcgcggacgagctgagatcgcaccactgcattccggtcctgggcaacagagtgagactctgtctcaaaaaaaaaaaaaaaaaaaaagggaaagtggtgagccttgagctgtggtgagctataaagacctttcctatgttagcctgactcaggccaagatcctgagggggttggaggggatcttaggcttttcagattttcctgcaggcttcttgctttgagcagatggtgactcactgggcagattctcctggtggagtcccttctgtcctggctgtagctttgtacttaggccatttctttgctgtaggcactcagaatctcagagccccaggcttgagataatttttctggtttaacttctgtaaagttacagatgagggacctgagacccagagaacaaggccttttccagggctgcaggccagttcccctttgggttgggcagtattgattgatactcttcctgggaaggtggcaatgcttacgggctttggatcagtgctaggctcatatgcttaactgccactgacaaggtttggagcccacgggcaaggtctttagtttctcgagctagtttttttttttttttttcgtgagacagagtccccctctgttgcccaggctggagtgcagtggtgccatctaggctcactgcaacctctgcctcctgggttcaagcgattctcctgcctcagcctcctgagtagctgggattacaggcgcccaccaccacgcccggctaatttttgtatttttagtagagatggggtttcaccatattggccaggctggtcttgaactcctgaccttaagtgattctcccaccttggcctcccagagtgttgggattacaggcgtgagccacagcggctggccttgaactagctttttaatccataaaatgacacctgggtgtgcgagacccggctgacattggctgatggtgtgcatcttcccaactctgtgttcagggatatcaggctgacatctctaagtcacaggtagggtatttacatcacggaaagtggcaaatgctacagctgaggccccttcctctctcctgcccaatgttcatattgactgggataattgtccctgcctcccagggttatcgtttcaagggtttcttggtctggtgagcatcgtatgagcagatacatacctggaaagcctcagcttggtgcagcaccttgcagcagctaacatttgacaagtagtacggccctactcacctctggacctctggacacggggcagatgtggggaggaggggccgaggagggggcggggccgaggaggaggaggtggggcttgaggacggggaggggtgtcgaggagggggaggcgggtcccaaggagtaggaggcagagtttagcaggaaaaggcatgtcctgaggaggaggagggggcagggctgaggtggaggaggtggttcctgaggatgaggaggtagggctgagaaagaagaggcggggccgggggggaaggggaggccgagggggaggaggtggggctcaggaggaggaggcggggcaagaaggaagcggcgggcctggatgggggaggcgggaccagggagggggaggcgggaccagggagggggaggcgggaccgagtaacaagaaggtgggacgggatgagtggtgggctttggtgtgtgccaggtggagtagctgtttcagccgcacccaggtggatttagaggctccaccagctgggcccagcaaagccttctggactaactggttcctgagaacagaggagggttgacagccttgagtgagggcggtgcttggaaaggccttgcgactctgataaggtggttgggtttggtcgggaatcctgcactttcattgacaagcctggctgcgtgagaaaggccagagaccttgagctagttggtcaagttcaggctgggtcttaacaccttcttgctgatactgatagtggcagctgagaatgttttaatacctgggacatttcctgcggcagccagaatatagtaatcttcctagtaaattacggtgaatatagtgcttaattatcagtgtttttttttttttttttttgagacgaagtctcgctcttgtcccctaggctggggtgcaatggcgtgatctcggctcgctgcacctccgcctcccgggttcaggcgattctcctgccttagtctcccgagtagctgggattacaggtgcccaccaccacacttggctagtttttgtatttttagtagagatggggtttcaccatgttggccaggctggtctgaaactcttgacctcaggtgatccgcccaacttggcctcccaaagtgttgggattacaggcgtgagccactgcgccggcagtgtgagtgcttcttatctagtaacatatctaaatcgtgtactaaacataagacgtagatgctgttcttatctctacttgactgatggagaaactgaggcacagaaagtgaagcgacttgtccacagctagtggctagcagagctgggattcttctagaaccagagtgggctttgctgtgggtcgtgcactggggaaagaatcaagtgtgtggtggtggtgaaggacttggaggccacccactctgtccttgggacagtgacttaacctaagcttcagttttgtcaccctgtgaggccaggataacgacacctgggggcctgtgggggagtgtgaagtgctcagcatgcttcgcggcccacaggcagggtaaaaatccttaagcggagagggacccacgttaggcaggtaaggacagatcagcatccccagggctgcctgagatgcttttggcacctgacctctttggaaggcctcaaaactcttttttttctttttttttttttttgagatagagtcttcctctgtcaccaggctggagtgcagtggcgtaatcttggctcactgcaacctctgcctcctgggttcaagtgattgtcctgcctcagcctcccgagtagctgggattacaggcacgtgccaccatgcctggctaatttttgtatttttagtagagacggggtttcagcatcttggccaggctggtcttgaactcctgacctcgtgatccacccgcctcagcctcccaaagtgctgggattataggcatgagccaccacgcctggctgagaaaagcttcaaaacttaatgaagaaggtccaccaggcgccaggagacagactgatgtcaaatcatatgcccagaaggtggaggaagaagcccagatgccagtgcctcagttttgatataatgtcacacaccatgcaagtcacatttttttttttttttgagacagagtctcgctccgtcacccaggctggagttcagtggctccatctcggctcactgcaatctccgcctcccgggttcatgcgattctcctgcctcagcctcctgagtagctgggactacaggcgcccaccaccacgcccggctaatttttttttttttttttttttttttttgtatttttagtagagacgaagttttaccgtgttagccaggatggtctcgatctcctgacttcgtgatccacctgcctcggcctcccaaagtactgggattacaggcgtgagccaccacacctggctgcaagtcacattttgagatgatcagctctttccttcttcatgggaagacccttggggaagtcacaccacactcagagcccactttttaacctgttgtgacaaagaatcatcccaggaagtggaggctagaagacagtctggccaccaggtgcctgtcacagctgcctcacctaggagcacactgcttctgttcctgctccctcctagctgactgttccccaccgagccacaggcagaaggcctttttgcctgtaagtgggaggatcttagtgtgccatggctcagaaccttccctcagaggcttgtcatctgtcccctgctttcctcagttgttactatgctactgtctttcacagatacccaaaaccacgttcctgccctaagcacatgctattccctcggccctggatgcccttccctctgctttcctcatgcctggcccttcgtgttaccgagcgctcagcttccatgtcccccagagagaccttccttggccatccaatctaaagtccaaccccttgcctgtcaccctggcaccccactcatctccttcgcagcccatctgggcttgggttgtgttttctttctttttttttttttttctgagacggagtcctgccctgttgcccaggctggagtgcagtggtgggattttggctcactgcaacctccacctcccgggttcaagtgattctcctgcctcagcctcctgagtagctgggattacaggtacccgccaccatgcctggctaatttttgaatttatttaattttttttttttttgagacggagtctcgctctgtcgcccaggctggagtgcagtggcatgatctcggctcactgcaagctccacctcccaggttcacgccattctcctgcctcagcctcccgagtagctgggagtacaggcacccaccaccacgcctggctaatttattttttattttttatttttactagagacagggtttcactgtgtcagccaggatggtctcgatctcctgacctcgtgatccaccctcctcagcctcccaaagtgttgggattacaggcgtgagccactgtgcctggctaatttttgtatttttatttatttattaaaaaatgtgtgtttttgaggcagagtcgtgctctgtcacctagactggagtgcagtggtgcgatcttggctctctgcaacctctgcgtctgggattcaagcattctcctgcctcagcctcccgagtagctgggattactggtgcccaccaccacaccccactaatttttgtatttttagtacagacagggtttcattgtgttggccaggctggtcttgaactcctgaccacaagtgatccacctgcctgggcctcccaaagtgctgggattacaggcatgagccaccgtgcctggccataatttttgtatttttagtagaggcaaggtttcaccatgttggccaggatggcctcgaactcttgatcttaagtgatctgccggcctcggcctcccaagtagctgggactgcaggtgtgtatcactatgtctggctgcttttttttgtttgtttgtttgtttgagttggagttttgctcttgcccaggctggagtgcagtagagtgatctcgattcactgcaacttccgctttccggtttcaagccattcttttgcctcaggctccggagtaactgggactacaggccacacgctgctaattttggtatttttagtagagacagggtttcaccatgtgggccaggctgatctcgaactcctgagctcaagtgatctgcccaacttggcctcccgaagtgctgggattacaggtgtgagccactgttcccggccagtgcctggctaatttttaaaggatttttcttggtagagacgcagtctcaccgtgttgcccaggctggtcttgaactccttggttcaagtgatctcctgcctcagcctcccaaagctctgggattctaggtgtatgccaccgtgcctggctggcaactggcttcttctggcctcttggccacaagccctgggtccatcctgcccgtggctgtcctgttccccatcatctcaaccctcctggcacagcggcccttctgagatggaagctgccgagacaacactgggcactcaccgcacaggttgtgggcaggtcctgctggtccaggccttttcccgtcataggaccctgcctctgttttccagtccatcacttattcattagttcatttgttccaacatgttttttccctcttatcaatgctaagaatcgtgggatgaacgaaccacattctctgtcctcaagatcttttcatttaagccaaggcctgaaggtcgaggtctttggggccagggaggagaatggtgttctaggcagagggaaccgagtggtgtgtgcagaggcatggagcccagagtttgcatatgtcccacgttgagggatgaggctgacagggcagggctttgtagccacccagagagacctgtggacttcttttcattttttttttttttttgagatggagtttcactcttgtcaccaaggctggagtgcaatggcacaatcttgggtcactgcaaccttcgcctcctgggttcaagcgattctcctgcctcagcctcccgattggctgggattaccagctaacgtgccaccacgcctggcgtattttttgtatgtgtagtagaccgggtttcacatgttggccaggctggtttcgaactcctgacctcaagtgatccgcccacctcggccttccagaatgctgggattacaggcgtgagccactgccctgcctcattttgatggcaatgaaagtcccttttctgttttattcaattacctatgaattattgtttttagtagagatggggtcttgctatattgcccaggctggtctccaactcttgggctcaagtgatcctcctgccttgacctcccaaagtgcagggattacaggtgtgagacaccatgcccgaccacattctactgattttacctaaaagattccctattggagggcagttcatttttaagtcctcagggggccctcatgccatagtgtttttttttttttttttttttttttttttctgagatggagtttcgcttttgtggcccagtctggagtgcagtggtgcaatctcggctcactgcaacctccgcctcccgggttcaatcaattctcctgcctcagcctcctgagtagctgggattacaggcatccaccaccactcccggctaatttttttatttttagtagaaatgttgttttactatattggctagggtggtctcgaactcctgacctcaggtgatctacacgctttggcctcccaaagtgttgggattagaggcattgaggcactgcacctgcccaccatggtgtttgtaataaaaatgcacagagcatttgttccttattctgagaagtgtaccgtggattgcgtgtggggcttactgggagcagagcgactcaccccagttacatggttagctgcatgtgggtcatgagtgtttcccagccctgcaaggtgtaaaggccctctctgtggccctgtagctgtgtcacagtgacaggctggcatggccctgcctctgtccctgctcgaatcaggctcttacgtaagcagagcccaccagccattcacagactgcctgagagaatgcagggctttatgcagtctcctgggtccttccaaattcttttttttttttttttccatttgaaagtgaacagggatcactggccagagcgtgggatctgggcttgtcctcagggtggggtgccaagttgggggtgggggtgggaagttaacacaagccctggggcttcaggaaacatctggaaacaggctgaagtcacggagctgagcctccaggctccttgtggggagaagctgtttccccagacacctcaagtgtctaactcaggaggtgggcagatgggtggagctgctgaatgaatgtttctcaggagctgggtggggttggaggattgcagagggtggggtgggggtgtgtgtgtgtgcagatactggaattcctgaggagacatgtatagttggaaacagtgtattgcctgtatactacttgtttcagagaatatatatatatatatatatatatatatatatttttttttttttttttttttttttttttttttttttgagacggagtctcgctctgtcgcccaggctggagtgcagtggcgcgatctaggctcactgcaagctccgtctcccgggttcacgccattctcctgcctcagcctcccgagtagctgggactacaggcgcccgctaccacgcccggctaattttttgtatttttagtagagacggggtttcaccgtgttagccaggatggtctcgatctcctgacctcgtgatcctcccgcctcggcctcccaaagtgctgggattacaggcgtgagccaccgcgcccggctatatatatatttttaaattgagacagagtctccctttgttgcccaggctggagtgcagtggtatgatcgcagctcattgcaacctctgcctcccaggttcaagcaattctgcctctgcctcctgagtagctgggattacaggcatgcaccaccccacacctggcttatttttgtatttttagtagagacagggtttcaccatgttggccaggcaggtctcgaactcctgacctcaaatgatcctcccgcctcagcctcccaaagtgctaggattacaggtgtgagccaacgtgccgggcctggagaatagtttaacaaaatctcccagccaggggtgggggatccacagaggacagagctggagaatccctatccaaatactggtgtggggatggtttctggagaggctggctgtgtggtcttggtctgaatgtgacaaaatacctccgagaagcctctgcccctgactcacccaggccacactcatcaccttgtcacctcatgtttgagttctccacacagcacttggcaccttctgataaggcatgtttgtgtaagcccctggctctcccctgtaacccctggccctggggagggtctctggatacttgtggaacgagtatgtgtatgtttgatagaggccactgtcttacggagcacacaggacaggctcagccgttcagccgcataattgatgcctgccctcaaaagtcactgcaactgatcaggacgaggatgcttgcatgatctcggggtgtgcggccattctatgggactggcaggtctggctttgagtgcgggtcctgagcttatagcatatccttggtgatagtagcagagggttctgctcttccatgaaccgggctcatcttttgctgctgcggtgtttggccattccttttttttttttttttgagacagggtctcactctgtcgcccatgctggagtgcagtggcacgatcacggctccctgcaactccaactcctgggttcaagggattcttgtgccccggcctcccaagtagctgagaccacaggtgcatgccatcacgcccggctaatttgaaaattttctgtagagatggggtcttgctgtgttgcctaagctggtcttgaactcatgggctccagtgatcctcctgcctctgtttcccaaagtgctgggattacagacaagagccaccatgcccagcacgtggcttgttttgaaccattgacacatcagaatctaggaactgcggtgtccttttcactccttcccttctctgttccctccctggtccaagcacctgagtctctgccctgagttgtttctaagcctctcaccactgtctctgaagccacatttgctcccttactgttcctctgtccccagcagagagatgattcttcaagaaaccaaagcagcctgtggcattccagcgattcctcattgctcaagggtaaaacctaaagcacttgtcttggctctgctccagcctgctgcttagctgctccccctaaaatttactctgttccagcctccgggtgtcacccgcttccccaaagctctgtgctaccccagggcctttgcattccccgccagggagcctcatgctggccctcagctgaaatcccatttcctcagcagggtcctcccgggcacacccactgtggccctctgggccctctgcaccgctgtctcctctccacagctcctggtacatcgtgaccccgtattatgtaataggtgctttgttcatgtccccttgagcaccagcaagcctagggggtgggggggatagcctctctcagtcgtgcgcactgtcatatcccggcccttggatcgctgcccgcacgctcttgttacacccgcctgactgccattcatcactgagcccagcagctggcacaggcaggcccgacgcagcaaggggcacagtccgtgttggttgcgtgcatggcgagtgcaaactgcacagttagcagaaaaggtttttgggagtgacagacacccctgcacacggttgagccctttgtaggtctccgtgtgacaagtacatccctgctgtgcttgggaaagggctgcggcttgggaaagggctgtgtgggttccctggcttcttcctgctgtccccgaggagcatcggaaatgggtcacaacgcagcaggtaaccgcagcctccctcaggcagagctgagtggctcagtattccatccaaggcctgatcagagctcctctgggccacatagagcccccaggacatggctggactaggagttgggaccctgatctcccttcctggctgggtcacgcccgccatgccactgactcttgggggacctgcctggaaggtgaggaagtgatccatgctagctcgtccctggggaccaagtccttctgcacctggggtggtcacaaatctgctttcagaaaaatcatgggggcggcgctgggggctactcagctgggaaatcattacagacatttccgatcatagatcacactgaaagtttttgggcatctaactcagaaggaattctagatttgggatttttttttttgctctgagaaaactccaccctaggccaggtgtagtggctcacacctgtaatttcagcactttggaaggctgaggtgggcggatcacttgaggtcaggagttcaagaccagcctggtcaacatgctgaaacccctcttctactaaaaatacaaaaattaaccaggtgcagtggcacgtgtctgtaatcctggctacttgcgaggctgaggcaggagaattgcttgaacccgggaggcagaggttgtagtgagcaacctcctgcagaaattttctttttatttatttattacagaaacagggctctcactatcttggcctggctgcatgcactaccgtgtctagcctggatttttctttctatgcttagaacctttggtcactgaaatatttcttaaacattattttttcttttctttttttaagacggagtcttgctctgttgccctggctggagtgccgtgtcgcgatcttggcttgctgcaacctccacctctgagggcgggttcaagccattctcccaccttagcctcccaggtagctgggactacaggtgcacaccactacgcccagctaactttagtatttttagtagaaacagggtttcactatgttggccaggctggtctcaaactcctgacctcaagtgatctgatctgcccgccttggcctcccaaagtgctgggattacaggcatgagccactgcacccagcctaaaaattaaatttcaatttgatcaacatgatagggtaatcagtgctaaccttcagtcataaacatgtattataataagatcctatgaaggagggaaacagaaaccaacgtcaaagcaaaaagagagccaatgttaaagagcttattcatagcctcttatttttttttaaagggataatggtaggtttcaaattactgaagcatttagactctagatagatttaacagagtcctgtaaatgtttatgtaaaatttttaataccgacagtaggccagaaatgacatcttttgcaactcttaaagcttgggtaaaaatattagttacaggcgtgagccaccgtacctggcctattttattttattttattttattttatgttttttgagacagagtctcagtctgttgcccaggctggagtgcagtggcatgaactctgctcactgcaacctctgcctcccaagttcaagtgattctcgtgcctcagtctccagagtagctgggactacaggcatgtgccaccacacctggctaattttttgtattttcagtcgagatgagttttcaccatgttagctaggatggtctcaaactcctgacctcaggtaatccacctgccttggcctcccaaagttctgggattacaggtgtgagccactgtacctaatatttttttttttttttgagtcagggtctcattctgtcacccaggttggagtgcaatggtgctattatagttcactgcagcttgggcctcctgggcttaagtgatactcttgccttagcttcctgattatgctaggactacaggtgcataccacctacagccggctacttttgtttttttttggtagaaatggggtcttgcgatgttgcccaggttggtcttgggtcttgggtcttggactctgggcctcgagggatcctcctgccttggcctcccaaccatgtgtgtgtttaatgggcatttcttttttttttttttttttgagacggagtctcgctctgtcacccaggctggagtgcagtggtgtgatctcagttcactgccacctctgcctcctgggtcaagcgattcttctgcctcagcctcccaagtagctgggactacaggcgcccaccaccatgcccagctaattttttgtattttttgtagagatggggtttcaccgtgttagccaggatcgtgtcgatctcctgacttcatgatccgccccctcggcctcccaaagtgctgggattacaggtgtgagccactgtgcctgggcctaatgggcatttcaaactttacatgtccaaaatggagcttctgatttttcctcttgaacctgcatttccccacccccttggtggcagttccggcctgtttgttacccaggccctaagctgtttgactctgctctttctctcatgcctcatgtccaaatgtcagcacatcccttagctcagcattctagaatttaaccacttctcatcagcctcactgccgttaccaggcctaagccaggggttggcaaacttaatccagctagcaaagatcttaggctttgcctaagggtctctgcagcactgctcatctctgtcgtctcttttttttcttttagagacggagttttgcactgtcgcccaggctggagtgcggtggtgcgatctcgactcactgcaacctccgcttcccaggttcaagcaattctcctgtctcagcctcccaagtagctgggattacaggcacgcatcaccacgtctggctaatttttgtattttggtagagacgggttcaccatgttggccaggctggtctcaaactcctgatttcaagtgatctgctcactttggcctcccaaagtgctgtgattacaggcgggagccaccgcatccaaccatctcagacatctcagcagcagtgataccactgtggcagccacagatgacatccagtgagcatggcgtgttcaatacaactctatttatggacaccaaaatttgaatttaattttcacatatcatgaaataggtttctttgattttttttttccatccgcttaaaaaggtaaaaacgtcatgtattttttaaaagataaaacaaaagttaaagccatttttagtcggttcaaaagccggcagtagaccagagttgccctatcggctgtagtttgctgacccatttgtctaagccatcattaccttcacagaattatttccacaacctttaattggacttttttttttttttttttttgagatggagtctcactctgtcgccaggctggggtgcagtggtgcgatctcagctcactgcaacctctgcctcccgggttcaagcagttctcctgcctcagcctcccaaggagctgggactacaggcatgcgccaccatgcccagctaacttttgtatttgtcatagagatggggtttcaccatattggccaggctagtcttgaactcctagtcttgaagaccttgtgatctgccctccttggccccctaacccggctaagtttttaaaagtttttgtagagataagggtcttactatgttgcccagcctggcctcaaactcttgggctcaagtgatcctcctgccctggcctcccaaagtgctgggattacaggcatgagccagcgtacctgacctgcactcagcttttggcctctttataaaatactgtaggccaggcgcagtggctcacgcctgtaatcccagcacttagggaggcttaggcgggcagatcacgaggtcaggagtttgagacgagcctgaccaacatggtgaaaccccatctctactaaaaatacaaaaattagctgggcatggtggcatgcacccgtaatcccagctactcaggaggctgaggcaggagaatcactggaactcggcatgcggaggttgcagtgagccgagattgtgccactgcgctccagcctgggcaacacagtgagactctgtctcaaaaaaaaaaataaaaaaaataaactatacacctgcccccttcaactgccactccctgtcccctttcctttctttcttctttccatgtcgcacgtcacctttgaacatattacatatagcgatttatttcattgtcactctttctttgccaagatgtgagttccatgcgagcagggatttttgtctctccttctatagctgaaccccacagtccttaacagggcctggcatgtgtcagtgaacaaacgagcctcagtttccttacctgcaaaagaggatgaatacattgtaaaggagatgattcgtgttgaggatgagcctccgtgcctggctggttgtgagtgggcgggtggtgttagctgccgccgcgtgtataaagcctgccacgtagatcccagtctaggctctttggcaagctgagctcatgggggtggactaacctgtctgctggactcgggcagtcgggggttggcccggatgagctcctcctgctcctccagtcagtttgtatctgcagggctcagcctctggcccccttccagcttcctggtccgacagcgccttcctgccctgagttggagagagacccaggtgtcgtccccaactgccacccagctgtgggtgcagggatgcagttctggaccatcccctgggggtctgggacctggggagttgagtgtttggcctttacactggagctccttgagggctggccccagcggccaggagtgtcagttttttggtttgtttgttttttagatggagtcttgctctgttgcacatgcagcagtatagtggcgtgatctcagctcactgcaaccttcacctcctgggttcatgcgattctcctgtctcagcctcccccgtagctgggactacaggcccgtaccactatgcccagctaatttttgtagagacagggtttcaccatgttagccaggctggtgtcgaactcctgacctcagatgatctgcccaccttggcctcccagagtactgggattacaggcatgaactaccacacccggccgctccttttacttatgaggacactcctttctcttattaagtccaccttaaattcaggataatgtcatcttaagatccttaattatatctgcaaagacactatttttttttctttttttgatatggagtcttgctttgtcacccaggctggagtgcagtggtgcgatctcggctcactgcaacctccacctcccaggttcataacgattctcctgcctcaggctcctgagtagctgggattacaggcacccaccaccacacccagctaatttttttgtatttttagtagagatagggtttcatcatgttggccaggctactctcgaactcctgacctcaggtgatccacccacctcggcctcccagagtactgggattacaggcgtgagccactgcacctggccaattattatattttgtgtagagaaggagttttgacatgttgcacaggctgcaggaattccctaattcctaagcagtccctgtgttagatggtcttgcaggcacacccatttactagttggagaagcagacaggcaaggcaggtctgacaccgccccctgtggcagtgcctctcagtcagcattgaggacgcgcccctgcttttctaggcccattggctgtcttagctagtgacaggaaaacatgcaggaggcattgccacagctgtaaaccctgcctgggccccgctgtggtatgagttgctgatagaccttttgctctggtacagcctggctgtgtgaggctgtggggcagaggccagcgggctgggtcctcaggccaggcagagaggctcagttcttggtgtctgctggaggatcgcatccagggtggtgggttttttgtttttttgtttttgtttttcttttgtttggttttacccttatttctttatttcttcctttcttcctctttttctttcctttctctctctctctctccccctccctccctccctctctctctccctccctccctctctctctctctctctctctctctttctctctttttttttttttgagatggagtctcgctctgtcgcccaggctggagtgcagtcagtggtgcagtcataactcagccttgacctcctgggctcaagcagtccatctaccttggcctcccaaagtgctgagattacaggcatgagccaccgcgcctggcctttttcttttctttctttctttctttcttttttctttttttttttttttgagatagcgtgtcttctgtcccccaggctggagtgcagtggtgcaatgataggtcactgcagccttgacctcccgggctcaagcaatcctcccagtctggcctcccaaactgctgggattataggcgtgagccaccgtgcccggcctgccttttcctttctctgttgcacatagccctgctctctaggatggaggcattattttattgtaggagctttgggcctgagcaagctgggtggacactcacatgggcacttccaggctacttaccttgggcgagggcttcctcgttcccaagccccagttttccaagccacgtaacaggcatcacagtctttttcttttcttttcttttctttttttttgagaggagtctcgttctgtcgcccaggctggagtgcagtggcgcaatctctggctcactgcaagctccgcctcccgggttcacgccattctcctgcctcagcctcccgagtagctgggactacaggcacccgccaccatgcccggctaactttttttgtacttttagtagagacggggtttcactgtgttagccaggatggtcttgatctcctgacctcgtgatccacccgcctcggcctcccaaagtgctgggattacaggtgtgagccactgcgcccggcccagtctttttcttatagggcctgggtgaggcctgggtggcagtctcagcatagtcctaggtacagggtgagcatctgatagatgtcacgtctgaatgaaacgggcgagatcagcgtcgctctgggtgggccagtgctcctcggaggccctgagggcacaaccgcagggatgggtgtaggctgtgggtaccactgagaatggggggcaggcccagggctgagacccaggttctccaacttcccactgtgtttgtcttgtgccatattcatcctctatgaatggctgtggctgctcgcccaagccaggagctcgtgcgtccgatgaccatcttccaaggctggattgctacctgctcgctcggggctctgctggatgggaacagcagctccagcttctccgggtcccgggctaccgctgcctctgcacctggccctggcctcggatccgagagcccagagacattggcattgagaccctggcacctctcgtcttgccagcacaggtagaagacaggagcagagcggtccagggacctgggagtgggaggtcagccactctcagcccttcctccccaccctgggtgacattctgcttccactgtggcgcctcggggaggctggtgcagccgcccccgggtgccactgagaaacgaggtcatacactgaggccactggggaaggtggtatttctggccgagcaggtgtggcctgtgcagggttcctggcagctgagccctaggtcttctcagccatcctggcattagcaggttgacttgatatttctggaagtgggaaggaaagggagccgagagggctgagccgctgagccggagtccagatgaatgtgccggagtctctgcatttgtgatgggggcgaggtgatgggggcgaggtggccggcgtggctctgggcatgatcgggccaggcctccgacctctatgctgggcattggctggacagggagctcaggcgatgagtgcagcagcgcttgtgcccggcgcggggatggtgagtgcctggctggccagctgcaggacctgtcaggccctttgtgtctttacctggggccctggttgcactgaccagggctcgcacccccagccaggcctcttgtgccccagactcgggagatgcttcctaccaggaagtgcagtcccctgcggggtccgagagagcctgccggagctttgagctcaacaggtgggctgtgcggcaccacatcagctctgcaagggggccctggaggcccatgtgtggtggggtatggcctggctttcaacatgcacgcgtggtcttctgggctctgggatttactgcttagatcttggcctcttcatctgtgaaacggagctaatggctcctgctccctccggctgctgcaggagagatgtctgggaagctgtggcagttccagccccgggcagggaacgtgaaataactgttggtcgctgttctcactcatcaccattaggcaggtcacgtcctaggacacacagaagtttcaggttcataagccatgggagatgaggccggcccagaatccaagcttcccgctctggcccgggtctgcccctcttctggggctgagagggcaggcaggtgccttgctgggtcctgtggtgtggactctgccgccagcaaggccattgaacctgcttgtttacagccgggagaggactgggaagcaccagtcttggcttgtttgtgaagctggggaagccgaagctccagaggccttctgtgcatggctgtgtgtgccaggccttcaggctgcgcctccaggggatgagcaggaattgcaggctcagctcttccagccttggctcaggtggtgcctgctcctccctccttccctgtacctctcatccccacacccactccactctcaggccacacccactcttcacctccacatctgtccagaatttcactgcttgtctctgccttgtgctttttttttttgagatggagtttcactctgtcaccaggttggagtgcagtggcctgacctctgctcactgcaacctccgcctcctgggttcaatcgattctcttgcctcagcctcctgagtagctgggactacaggcgtgtgccaccatgcccagctaatttttgtatttttagtagagatggggtttcaccatgttagcctggctggtcttgatctcttgaccttgtgatctgcccacgtccgcctcccagagtgctgggattacaggcgtgagccactgcgcctggccttgtttttttttttttgagacagggtcttgctttgtcccccaggcaggggtgccgtagtgtaatcaatcatggctcactgcagcctggaactcctaggcttaagcgatccttctgtcacagcccctgaggagtaggtaggaccataggtgcgagtcaccacacccagctaattttttatttttgttttttgagatggagtcttgctctgtggcccaggctggagtgcagtggtgtgatctcggctcactgcaacctctgcctcctgggttcaagcgattctcctgcctcagcctcctgagtagctgggattacaggtgcccactgccatgcccagcaaatttttttgtatttttatttattcttttttttttttttttttttttttttagacagagcctcactctattgcccaggctggagtgcagtggtgcaatcttggctcaccacaacctccatctcctgggtttaagtgattcttgtgcctcagcctcccaagtggctgggattacaggtgtgtgccaccacacttggctaatttttgtgtttttacacggggttttaccatgttggccaggctggtctcgaactcctgacctcaggtgatctgcccacctcagcctcccaaagtgcttggattacaggtgtgagtcaccatgcgtggacacagctaatttttataaatactttttgtggaggcagagccttgctattttgcccaagctggtcttgaactcctgggcttaagtgatcatcctgtctcagcctcctaaagtgctgggattccaggcgtgagccactgcgcccagcccacttttcacctctctatagctccctctttgctcccagcttctgccctcactcctccagtctgttccacccagcagtggcaagcaggtaaagctggggaagccaagtcttgaacctgagccaagtctcatccctcctctgctcaagaaccctctatggctgccacttcactcagagtaaaagctaacgtcctccccgtggcccacaaagccgtggcacagaccgccacatcacctttctgccctcacctcctcccactctctccctgactcactctgctcaggccacacaggactccttcctgctcagccacgctaggtatggtccagcctcagggccttggcacttactgttccctctgcctggactgcactggttcccccactgtctactggcctttgttcacacgccactttctcagaaagggcttctctgaccactctcaaatggccatcctcttggaggttgcagtgagccgagatcgcgccactgcattccagcctgggcgacagcgagactctctcaaaaaaaaaacaaaaacaaaaaaaaccacattgtgacctcccccacaaccttctagttttgttcacaactcttggtgacaaaacatgctatggctatctgcccccaccccctgcttgcccagcacgcacaggctagaattcaggtcccatgaaccccagaggctggcttggtttttttcactgccatatcccaggaactggaacagtgcctggggtatgggaaggagggagtcaggaatgaatgaatggataaatgaatgcaggctccctgagctctcttggctggtggcagggccagggttaaggtcccattctgcaccagagctgtctccgtccctgacatcggctttgggactgttcctgagccggctgctgcgggtgcccttccagcaggcgggagtaagtctgtgcggccacaagggggcagtggggagcgtcgcagcctccgccgcttgcagccagtcatcccggtggtgacgggtcagctcggcctctgcaccgaaagtatctcgctattgttagggtttgggttcactgtgaccagctgggcgaggcatcagtgcaccagctctctggccctggcttcctgtggatgggccccttcaagagcatggtcagcgtcccaggagaaggggcctgtggatcctgccagggtttggcccccttgtgcacctggcatggctgttctgctagtgttggtctaatcttatttatttatttatttatttatttatttatttatttattttgagacagggtcttgctgtgtcgcccaggctggagtgcaatggcataaactcagctcactgcaacctccaccgtcctgagttcaagcaattctcctgactcaacctcctgagtagctgggattacaggcacacaccaccatgcctggctaatttttgtatttttattagagacggggtttcaccatgttgggcaggctggtctcgaactcctggcctcaggtgatctgcctgcttcggcctcccaaagtgctgggattacaggtgtgagccatagtgccccgcctaatcatatttattctttttttaaattttgagatggagtcttgctctgtctcccaggctggagtgcagtggtgcgatatcagctcactgcaacctcctcctcctgggttcaagcaattctcctgccacagcctcctgagtagctgggattacaggcatgcaccaccacgcctggctaatttttgtatctttggtagagacggggtttcgccatgttgtccaggctggtcttgaactcctgacctcaggtaacccgcccaccttggcctcccaaagtgctaggattacaggcatgagccaccgtgcccggtcatcatatttattctttttttttgagatggagtcttgctctgtcgcccaggctggagtgcagtggcgcgatctcggttcactgcaagctctgcctcccgggttcgcgccattctcctgcctcagcctcccgagtagctgggactacaggcacccaccaccgcacccggctaattttttgtatttttagtagagatggggtttcaccgtgttagccaggatggtctcgatctcctgacctcgtgattcgcccgcctcggcctcccaaagtgctggcattacaggcgtgagccaccacgcccggcctatatttatccttaataagatttatcctaaactggggatgattacggtaaccctgtcagatggcagctggggacagcccactttgccatgagtagatggaagttcagagaggttgggtaacttgcccagggccacacagccaggaaatgggcaggtctgcttctctgggttgttcacccaccaggcgggcgggttcccaggagctgtgacaagtgcttagacaacgagagccccccttttcactcctcctgcccccattagtaatatcttcatgaccacaaagacagtgaagacgggctctgttgcttgcggcactcccctctgggcttgggaggcacaaacctcgcccctgctccctcttgcagggtgcgcttcacgccgcaccgtgtgtcctggctcttggctctgccctgacctcgtgctgcgacgagttgctgttggctgggccccgggaatcttgggcctcctggtgagaattcctctcaggctagtggaactgtcatcacagagccacaggccggcagagccaccagcctgtgccccaggccagagtgcctgcctgtctgcccgttcctgccctctccctgcccgtcgtgcctgaggctatgtggtctcaccccttgcccgtggccagtgctgggacctcgctgacaccagtagcccccctcccacaggtatcccttcatccacccagagcatctcagcccctcccagcccctccgagtggctccgtgggcttcctcagaaggtcctgtctgtcctccctgcctcaccgcttctcctggagatggggccagagcctgccacctccccgtctgtgctcaggatcccctgcctggggctctgttcagcagctgcctgtaccctctgcagccctgggcttcccctgggagcccctgccccctgttggcctcaggcctgggcaggcgtgtgtgtgtgtggcaggcacagagcagagattggggtggcagtggggtgtggggcgcggagccctcgatgaggtctcacattaggccctccctctgaggggtggggaacctctcctgctcctcccacccgactgtttttattttgatgggtatgtggggcctgtttgttacccctcacccctttaaacaataatttattgaggtgaaattcatgtaacatgaaactaaccatttaaaagtgaacagtggcattgagtgcacgtgcatcattgtgcagcctccacctctgtctcgtcccagaacattttcctcactctgaaaggagaccgggtacccagcagcagccactccccattccccccgcccagcccctggcccctccaatttgcttttctgtctgtctgctctgggtattttgcatagatatgggacctttgtgtctggcttgtttcctagcgtaacttatttcttttaccccacctggaatatcttatttaactttcttacttagaaataattataggccgggccaggtggctcacgcctataatcctagcactttgggaggccgaggtggtggattgcctgagctcaggagttcgagaccagcctgggcaacatggtgaaaccccatctctcctaaaatacaaaaaattagctggatgtggtggtgtgtgcctgtaatcccagctactctggaggctgaggcaggagaatcgtttgaacctggggggcggaggttgcagtgagtcaagatcgcactgctgcactccaacctgggcgacagagtgagactctgtctcaaaaaaaaaaaaaaattatagagacacagggaattgcaagaatagtatggagaggtctcctgctccccccagagcctttcagtcctctctctaggaggagatggccgacgagctggggatttggggcaggaaatgggagacggacggccgtcccactgaggactcatcctgcccaggtggccctagccttgggcatttcttgtctgtaggggcccctaggtgctgccttgcagcccgggcttacctccttgcaggtttgggcgtctcctctccttgggcctcaggctggcctgggcaccactgctgcagctgtgagcgtggcccctctctcgctaccccctcctgccgcagcccggcgtcctctcccagcagctagccgggaccccgatggccgtactctccctcttgggccctggtttggtgcccaggttggggggagcagggtacgatttcacccctcccactagcagctggctggacagggagaggggctggttgtattttaagctgttgagtggttcagcaggaactcggaggccttctctccctgtggacgctaggctgccttcctacaggccacacgggcttggaagcatgtgggcactgcctgcctggggcccaggaactattaatatacctgcagccacagggcaggccccgtgcccgcccagggccctgctgtgctaaccctttcccgtggatcccgccccgtgtcctctgtccctatcctacatatccccttggtggggcccaacgtcctgcgtggtgtgaccgagctctttttttctggcccctccatgtgccagctctttggccttgttatcgctgtggcttggaggagttcagtaaccttcccctagaggccacaaggccaggcagtgcctggagttgacagcagggactcaggaggccccgtgggccaggatttcctggctgctgggcccattcccaccctcctgtccaggaagtgggggcgagtgtgtcatggctggggaaataggcccccatgctgtggtgactgccaggccagcaggggagtggggatctgaaccaaacccacgggcaacaatgcctcctatcccatggggtgcctcccatctgtcaggggtcacctagtgtaccccatgcattgtctcaggggaccgtcacagtcctgggaggtagtctgcttcctacctgcccccttctgaggcctagagagaggtgacatgcctggggtcccccagggactacaaggcagggctggttacggttcccgagtgcaggccaccaagcccccttgtctcccgctgtcgttgggaatgtgcaggaggggtacccagcttctctggcttgaccgtggtgccctcatcttcaggatgggccctagctgccgtggcccggtctccctgggctctgggtgggtgggcctgccctgggatggccccagcccagaggtttgtttctgagcattgtgtcctgctccttttcctcaggcagcctctgggggcccccgctgggtttctgtgggtaggaagggtcccccaagaattgctggctggtggctgacttgggatcaggcctgcctgcttgccacgacccctgtataataggattgcactgacccctgcatagggtgggtcagatccccgggggctgcctccctccagccctgcccctctgcacccccatcgttcatcactggcctgggggctcagggagggctgggccagactcctacctcaggggctggcacaggcctggctcttggacgcaggaagcgccgggctttagtggggcgcaggtcctgggtgagggtgcagtgtttgggctgactcagtggaaagcctgccccacaggtggctataaggtgagaagtgggtggggaggaaggttggggagacctcatcagcccaagctggaggcggttgcctaaaacttccacacaccccgatcctttccacacttcgagagaggctctctgcacccataactccagaatctgtcacctccctggtaacacaaatgcacaaggaaaataatccaaagtgtctcttacagctcagaaggggaaatggatgatctgtctcgcggattctcaaaatagctgggatttctccaagcccagtgaactccctaggcctgagctgcgggctggggcctgcacggcccgctggcctctcactctcctctagccactggctctgtgcagggcgggggctgggaggtgttgtcatgcctgcccctggggctttccctgtgctggtgccgttgagggttttgaggtgaccactcaaaagctgctttcagggcagcctggctccccggggagactcccaagcccccctcagagaaggtctgtggcatggctcctggggggcgcagtctggggtggttttatatttagctgggctgtggctgtggttgccactcgggttacatctggcacagaagtcggcagtgccagggccggcacgggctcctttccagcaccgcggcagaatttgatcgcgcttgcccggcccagggctgcttcccgtggggaggtcggtggtgggggctgacggccggcagctggggctgctggccaccgtgggcagagccgagtggcagggctggtggcaggcggcatggacttgaacttgagcttgttggcccgggaggccaccccaggcctcctccctggcctcaatgggctccccaggcccacacccccaaaggtggccaagaaacctaaaaaggctgttctcttcttcgaggtggagattctggacgcaaagacaagggagaagctgtgtttcttggacaaggtaggactggggcgtgggctgcactgggccaagggcactgggcccgggaccccaatccttatagcccaggagctgtccagtggggccctttgtgccccaccccctgccctatggaggggtatgccctcacttggggtagggtggatagccatgtcccctgggtgtggcggggaaatggaggcacaggagtctcagtggaccctgcggggattttggtcctgggagggcggtggaggagtgagccttgcccctgctgaggccgggcctgggggaaggggcttgcgctgtccctggggaggacagagggcctttgctcctgggagagtcatgggtgagaagtggagaggaggggcagagaagcaggcttgccttcccatgcttaatccgccactagccgggctgggggcctgctggctgagggtaaaagtggagccccagacccctgctgtcactgcactggcagggccctcggtggtccttccctgactgcaggcagaggcctggaccccagcccttcccccttcccatagctacagcccaacccccagcctgccatcccctttagtacctccccatcctgagtctgggctccccgcagagctgacgtccctgcgcctgtgcttcccccaggtggagccccacgccaccattgcggagatcaagaacctcttcactaagacccgtgagttctagtcccggccacactgcccctgcaacccctttgaccagggaccttagggtgggagggatcccatcctgcacccctctcccaggggcctgcagagatgccccagtgtggcccaggcttctggggcgtgactggggcaggcgcctccacgtggcactccgcaggaacgcccttgctaggctctgggaaggacaagatcctgcttctgcccgcgctcttctggcttgtgtcctgaaaccgcacaagcctgagggtttgcccccaggtgggaggagctgtggagtcctggggtccttgcaccctgggaaccctgagaagctggcacagtggctgggcagcggaccggctgagccctgccaggctgtgggctgtaactgccctgttctccccgcagatccgcagtggtaccccgcccgccagtccctccgcctggaccccagtgagtacagctgtccactcggcccgccccctgggctcctgggtggcagtgggagaaggcccgggtagcccctgagccctggcccgcctctctgcagagggcaagtccctgaaggatgaggatgttctgcagaagctgcccgtgggcaccacggccacactgtacttccgggacctgggggcccagatcagctgggtgacggtgagtcctgaccctacccacggcctcttttcccgtcagccacgttgggtgactcatcttgcccccctctactctcaggtcttcctaacagagtacgcggggccccttttcatctacctgctcttctacttccgagtgcccttcatctatggccacaaatatgactttacgtccagtcggcatacagtggtgcagtaagtggggcaggtgggaggagggtaggggaaggcagaagacctgccggaccagccccagctgagcctgctccccccgaccagcctcgcctgcatctgtcactcattccactacatcaagcgcctgctggagacgctcttcgtgcaccgcttctcccatggcactatgcctttgcgcaacatcttcaaggtgagagcccgtccccgcctcacccctaagccccgcctttctgccccaccccgccccgcccccaccgagccccaccccaaggcccttcctgtctgccactacgccccagcagagccctacccctaggccccgcctaacctccccagccccgccctcgcagagcctctagaccccgcccgtcctccccagccccgcccccgtcgggcccctaggcctgcctatccaccctagtcccacccctaggcaccgcctatccccccagccccgcccctgcagagccccgccccagtttcacccctaggcccctcctgtccaccacgccctcacagagccctgccctagcctcaccccttggccccgcctatcctccccagccccgccccaaggcccctcctgtcctttcccaccatgctcccaggcccctcgggatgagacatgggcagcatctgccttgtccggtgctggcccaagtcccatccctgccctgctccctttcagaactgcacctactactggggcttcgccgcgtggatggcctattacatcaatcaccctctctacactccccctagtaagtggcctcagaccatccttccctcccccacggtccccacccagcgggtcctcccctcatgggctcccctccctgcttcctcttcagcctacggagctcagcaggtgaaactggcgctcgccatctttgtggtaaggaggctgggtgtggggacggggtcgggggagtctgggcggccctaggctgatcctgcttctctgacagatctgccagctcggcaacttctccatccacatggccctgcgggacctgcggcccgctggtgagtgcctgctgggggcagggggacagctgggctgggtgagggggtctgactttctccttctgtcctgcctgccagggtccaagacgcggaagatcccataccccaccaagaaccccttcacgtggctcttcctgctggtgtcctgccccaactacacctacgaggtgaggggctgccttacccctctctgccctgggacttggggtcccatgtggagggaccagcccctaggatggggcgcctggctgggcagctgcttttgccgcctgcactgcgagcattgggaggtggagaccgcggcctctctgctgtggtggcggggaggcgtgtgccgctgggcttccgccgtatacagccccgcctccgctggaattgggttcccatccctgactcagaaagcaggggcggcgggaggtggctggctgagtccaggacagccacatacacgggttgcgaggctgcccacgctcactctccgcccctgcccacaggtggggtcctggatcggtttcgccatcatgacgcagtgtctcccaggtgagcctgccgccctccctcggcggggccctgcccctccgggccggcagcccctccctgacgcccgttctttcctgcagtggccctgttctccctggtgggcttcacccagatgaccatctgggccaagggcaagcaccgcagctacctgaaggagttccgggactacccgcccctgcgcatgcccatcatccccttcctgctctgagcgctcacccctgctgaggctcagcccctcaacccggtggcattctgggggaggagtggggcccacagctctccagcacccggaataaagcccgcctgccccagtcggactcgggctctgtgtgtttctttccggggttggggaccaccacactgcccttcactctctccccactctcgcgtcggagcagtaagaggggactctggttgaggggcctgaaggcttttatttgactggtccatagggtggggggtgcaccccctacagggccaccttggggtccacttccccgggtccctggcctttggccaactctgccgccttcttctcccgccgcttcttccgctggagcagcctccgctcccgctcaaactccttcatgcgcatcacatagctgggggaaaagcacgagaggggctgtcagggtccctggccaggacacgccccccaagccctgggaagcggaggggccgtcccagagcactgtgggggaggcctctgaagaagacatgtccgagtgcctgtggcttgggtctggggtctgcccacgcaggtggcagggcttcccactggaacctgggcttggccactcccctaggtggcttcagccacctgccctgtccccatcaaacaggcccctagagagccctctctgggactaaggtggggcccggctagaaacctcagtggcagttcaggtccctggcctctggagccacatcctgccaggggccaggcctgggtggggtgcaggctgtgggtgttggcgggggtgggaggggggcttgggcgggctgggcatgtggggggcttgggtgggccaggggtgtggaaggctgggggtatggggtgttgcgggccggggtgttgggggctggtgtgggggtgctcactcgcggtgctcgcagtagtcccagtcgtgccgctcctgcttgcaggccaggaagttggggaagctgtcacgcttgcacttgagcagccggatgaggtggtgggcgcagtagtcccgcagctggagcctcagctgcgcgtccatcatctcctgctgtgtggccaccatctctgcagggagtgggcggggctcaaccaggctggaggctccccaccccaattccggggatccccaggggaccgaggcacacggcttcaggaaggcacggcttggggtgtcccccattcacatccagatggcagtggatggcagatgcctttgacggatgcactgtcctgaaggggcctccttttctaatttgcacaaaggcaactccagacaccaagggccagacaggagaaggtggctccccatcaccctgaggcacctcaacatcccgtgccggatccttgcctcccctcccacagggatgcccgtccccagctctctacagccccgctctccagagtccgagttcagaatccaccttctcccagagtaaccctcagcccctccacctgcacctggggctccaggcagcactcccagcctttcttgtctgcaacccacccaaggcccagctctgcactggccggcggcgtggcctctctctcagcctcagaactgaccatccggtcatggaagttacccgagcatccactgagctaacagtacctgtaaggtacttaggcgtgggctcagaagacagctggactagtatctgggtcccggtgccccactcacctagcaaacctgactccggacaaatcaaccttcaggagggggccgatgggagcatgaggaatcctggacactcaccccggagcctgtgcctggcgatcctgcactcgttccccaccgcctccctcagacccagcctccctagccctcctgacgtccaccacatctttctcggtcccagctccttcccatctgcgcaagtgagacgagatatattcacatctcaatggcagtcgtcccctgctggcttctctcccctttgcttcccagctgcgattctctcatcccactgaggcccaggtcctcctctcctgccccttgtcccattccctggcttctgccctaccccctcactgcccagacacgggctctcacagggccacccaacagcccaggaccccagcctcccgcttccttctttcctgtggctcctcccacatccctcctccccaggtttcctcccatctctatggctgccttaccttacgctttgttctgggagcctttttcttttcttttgagatggagtctcactctgtcacccaggctggagggcagtggcaagatctcagctcactgcaacccctgtctcccaggttcaagcaattctcctgcctcagcttcctgagtagctggaactacaggcgcctgccaccatgcccgactaatttttgtatttttagtagagatggggtttcgccatgttagtcaggctggtcttgaactcctgacctcaggtgatccacccaccttggcctcccaaagtgctgggattacaggtgtgagccactgtgcccggcctgagagcctttttctctgctgccgccccgtatgtagatgagcccgatgtggtccctccaccccacacctcgcttgagccccaggcctgggtatcacctgcagcccctggctgttccctatctgcacttggagctccaggtggcaatcctagactcctccctcttttgtcttgaacttataatcagctagcagcaaggactttagactgcctactgtgtgcttagtggtggggatacagcaggcaacacaacacacaagtgtccctgccctcagagggagacacagaacagacagaagacagagcaccacagcgtgtctggcagtgcttaagtattagggagaccagcctggggagcacagaaagatcccatgtccagaaaaaaataaaattatctttgcacggtagtgcacacggagtatccagagctactcgggaggatcgcttgaacccaggagtttgaggctgcagtgggtgataaccaccccactgcactccagcctaagcaacagagcgagagcccatctctacaaacaaataaataaatatgggccaggcgcggtggctcacgcctgtaaacccagcactttgggaggccgaggcaggtggatcacttgaggtcagaagttcgagatcagcctggccaacatggtaaaaccctgtctctactaaaaatacaaaaatgagtcaggtgtggtggcacgcacctgtaatcccagctactcgggaggctgaggcgggagaatcgcttgaaccgggaaggcagatgttgcagtgagcaaagtgactggctgaaagggggtggaaaggaggaaagagagggcaggggacagtgatctaggagggagggagagagtgaaggatccgggaggtaagagaaaggccaggcaccataaagagtccactggagtaccaatcgggagaccggtcagcagggactgcaggaatgcgccaccacacccagctaattaaaaaataaaaataaaaaattgtagagacagggccttgctatgttgcccaggctgttcttgaacttctggccttgagcaatcctcctgcctttgcctcccaaaccgttgggattacaggcatgagccattttgcctggcttagagctgtttttttcttatctccccgccccccattatgttcagttgcacggggataggcaccaaggaagggaaagaggtgagtttatccagagtaagcaagagagaagggcagcaggttgctagcgtttgcaaagctgatcttggggaaagcaaggtatgtgaggcagtgggaggaaggtggacggaccaatgaactgcaggttcagctggggcggaaggactacccggagtgtggacactggagtgattataccatctcccaactttctctcaaatccaggctgcttagaggtctctgtctcaagcttgtcgcccactcagtagacagtgtgaccttttgaccaaccaaaactgattgtgtccctcctctgcttagaagcttggctctgccacctctctttggtcaacccctactcatgccccttcacatctttgttttgttttgttttgttttttcagacagtctcgctctgtcacccaggctggagtgtggtggcctgaccttggttcactgcaacctctgcctcctgggttccagccaattctcctgcctcagcctcccagacagctgggattacaggcatgcgccaccacacctggctaatttttgtatttttagtagagtagagacggggtttcaccatgttggccaggctggtctcaaactcctgacctcaggtgatccaccggccttggcctcccaaagtgctgggattacaggcataagccaccgtgcccggcttaatttttgtattttgtttttgagatggagtcttgctctgtcgcccaggctggagtgcagtggtgtgatctcggctcactataacctctgcctcctgggttcaagcgattctcctgcctcagcctcctgagtagctgggactacaggtgtgcaccaccacgcccctggctaatttttgtatttttagtagagacagggtttcaccacattggccaggatggtctcaatcccctgacctcgtgatctgcccgcctcggcctcccaaagtgctgggattatgggtgtgagacaccatgcccggcctcaatttttatatttttagtagagatggtgtttcaccatgttggccaggctggtctcaaactcctgaccccaggtgatctgcccgccttagcctcccaaagtgctgggattacaggcatgagccaccacgaccggccacccttcacgtctttgtttccagccactgcctcttggaagcctgctttgacacccccagctctgcctgattccacaatctttcccactgtgctgagttctctggagacagtgcctgcatccctccagttccctgctgtatccgcggtgcctaatgtgggacgtggcccagagctggtgctcggtatgcctgtgatattactacattaaaagcaaaaacaaacacacgaaccaaaaaaccatcctgggcgtagtggctcacatcttcaatcccagcactttgggaggctgggcagaaggatcgtttgagcccaggagtttgagaccagcctgggcaacacagcaagacccccaactctacaaaaaataaaaaatcagtctggcatcctggggcgctcctgtagtcccagctactcgggaggctgaggcgggaggatcatttgagcccaggaggtcgaggatgcaatgagctgtgattgtgccactacactcagcctgggcaacagagcaagatcccgtctcaaagcaaaacaaagcactttgcaggacagtatttgcagctcgaatcttccttatttccttgtgcataccccacaattgcagtgacatcaggaagggggtacaatgaacgtgtccctgccctcccatgactccccacgtcccccaagacttggcccgaggccgggcgtggtgactgacttctgcgatcccagcacttggggaggccgaggcgggcggatcacttgaggtcaggagttcaagagcagcctggccaacaaggagaaaccccgtctctactaacaatacaaaaaagtagctgggcatggtggtacacatctgtaatcacagctactcgcgaggctgaggcaggagaatcgcttgaacccgggaggtggaggctgccagtgaatcgagaccaagccactgcactccagcctgaaagaaaaagcgagactccgtctcaaaagaaaaaaaaaaaagactcgacccagctctgcgcgtcgcattcctgcccgaacccccacttgtcgcctcacttttgctccctggcttttgctcaagccgtgcccttgggctggaacgcctccacactgaggtggggtcatgcacgtcctgtggactcctagtctagacccaaacccagatacaacacctgaggttagagcccagccctggggtgccagccctggggtgccaggtgttcaggcacccgcgccccacgccctctggctgcgcctgcgcactgggcctcaccgcgctccttgcgttcggggaagccgtagtctggcgggaaggttggcatctgcagggggtcgggctccaccgaggcatcgcccaggtagcgccggaccaggtgggcccccatggctgcagtcgctgcagatccctgcagcagccgagggtcacctagctcctacccggaaccactgacccctcagtcagacacagcttccgggtcatttaggcagctgcggagatcatagagatgaaggactccagaggatcgctccggtccgcctggcgtcacctcgcggacaggcggaggcgggacaggtgctgtgtctcttcgcaggatatggttggacccgagaggggacttccctgagcctggaaatccatctgggcggggcagaaggggacggtgtgggactgaggcctccctcgaccctatctggggctcttctggtagcccgaggctaaagcacatattaaaattatttttcatatcattttccaaaaagttttttctttgaaaacattcaaatttctcttaaaaaaggcacgatatctattatatcgttaatgtatgtaattttgcataaagtcactttaagaattttttgtttttggagacacagtacctgtcgcccagactggagtgtattggcgcgatctcggctcactgcagcctccacctcctgggctcaaattctcttgcctcagcctcctgagtagctgggattacaggcgcccgccaccacccccagctaatttttgtatttttagtagagacggggtttcgccagttggccaggctggtctcgaacccctgacctcaagtgattcccccgcctcagcctcccaaattgctgggattacgggcatgagccacagtgcctgtccaagaaagattttgataaatttaatttaaataaaagttattcataaatacagttattattatattattattttttgagatagggtctcattctgtcgcccaggctggagcacagtggcacaatcatagctcactgcaaccttgaactcttgggctccagggatcctcccgcctcagcctctcaaagtgttgggattatgggcgtaagccactgtgcctggtcaaaaacaattatttaaagctgaaatttcaaataaattatatatatatatgcaatctttatacaattttaaaatatattaatatctaatattaatatctaatatatatttttccccagtctgacaaagcatgtattaggcatctactgtatggtatgctgggtccagtggtcagacagaaaggcagacgtggttcctgtctttcaagcttacagtctaatggaacagaaaaacagtctaatggaaaaaaaaaaatatgggccagggcagtggctcacacctgtaatctcagagctttgggaagctgagatgggaggatcgcctgaactcaggagtttgagaccagcctgggcaatatagggagactctatctctacaaaaaaaaaaaaaaaaaaaaaagctgggtgtggtggtgcacgcttgtagtcccagctactcgggaggctgaggcaggaggataacttgagcccaggagttccaggctgcagtgagccgtgatcccatcactgcactccagcctaggcaacagagtgagaccctgtctataaaaattcccaggtgatgtgatgttgctggtctagtgaccagctttgggagaattactcaactagatctttatgtgttgacatggggaagtggctgctgatatattaagtgaaaaaagcaagctattgagaatagacaactggcaatagagacttttctttttctttcttttttttttttttttttgagacagagtttcactcttgttgcccaggctggagtgcagtggtgtgatctcggctcaccgcaacctccgccttctggtttcaagcgattctcctgccttagcctcctaagtagctgggattacaggtgggtgccatcacggccagctaatttttttttttttttttttgagacggagtcttgctccgttgcccaggctggagtgcagtggcgcaatctcggctcactgcaagctccgcctcccgggttcacgccattctcctgcctcagcctgccgagtagctgggactacaagcgcccgccaccacgcccggctactttttttgtatttttagtagagacggggtttcaccgtgttagccaggatagtcttgatctcctgaccttgtgatccgcccgccttggcctcccaaataatttttttgtatttttagtagagacggagtttcatcatgttggctaggctggtcttgaactcctgacctcaggtgatccacccgcttcggcctcccaaagtgcagggattacaggcttgaaccactgcgtccagctgagaccttctttccagggctacctgtgtgacctgtccctatctccaggccaccacattaatctgtgattcttgtgcccttctagactcaagggggcagcattcacattgtgatctctatgaatggtgcttctggagttgtgccgtgcacagcctgcacagctgcatccagtaaccctgacgtgttctgggcgtgtctccttaatcttcctttctctgtgcttcagctgctcacccagaggtcagagctcaaagggagtccagagaggcaaattacagtactagctcactttccctgtgtgacccccagaagtgacttcatttctcgcagactgagtttactcatctgtaagatgaggtttgtaatacctatctcataatgttcccagccagcgagggctcccctcctcctgatggattccacccctttcctggctttatttttttattttttcaagacagggtcttgctctattacccaggctggagtgcagtgtcatgatctcggctcactgcagcctctgcctcctgggctcaggcgaccctcctgcctcagcctcccgagtagctgggattccacgtgcgtgccactacgcccagctaatatttgtatttttgtagagatgaggttttgccatgttgcccaggctgatctcaacctcttgggctcaagcaaaccacctgccttggcctcccaaagtgctgggattacaggcgtgagccatcatgctggacctttattttcctccttcgcacttagcaccatttaaactgcgatccatttgccttatttattttgtttattattggtctcttctctcaactcagctctgtgaagcagggaattttgtctgtcttgttcactgccatattactgcacctagaacagaactggcgtgcagtagatgcttagaaaatatttgttgaatagactgggtgcggtggctaacgactgtaattacacggctttgggaggcggaggcagaaggatcacttgagaacaggactttgagaccagcctgggcaatatagggagacccctgtctctacaaaaaaataaaaaaattagccgggctggtggcatgcacctgtagtcccagctacttgggaggctgaagtgggaggatcgcttgagcccaggaggttgaggctgcagtgagcaatgatcatgccactgcactccagcctggtcaacagagcaagaccctgtctctgaaaataaatacagaacaatacaataaaataaataatttgttgaataaacacaggaataaataaatagagaaggtggaagaatcagatggttgcatcaaaagtgcttagtgcctggcatccagtaggtgctcaatacatgctcactattgtttctttcatccaggtcacagtctggcgctagaaagccaaacaaaggaggctactgtgaccagtcatttcaccagaggctgaagggattcaagccagggatgactggggttgggcgtggaggcatgtggcccattccattctaaacttccaggactcaaatggttcagcctggcctagccttaccgagcactggggacctggggggaatgatactgaaagggccattgtctggggtgataactgagattcgttgtcttacagcggaggaaatcaaggacgtggacacacaaggagtgaggttaagagaggaagtttatatttatttatttatttttttgagatggagtcttgctctgtcacccaggccggagtgcagtggcacaatctcggttcactgcaaccttcacctcctgggttcaagtaattcctgtctcagcctcccaggtagctgggattacaggtgtgagtcaccctcctggcctatttacttattttttgagatggagtcttgctctgttgcccaggctggagtgtaatggcaggatctcagatcactgcaacctctgcctcctgggttcaagtgattctcgtgcctcagcctctgagtagctgagattacaggtgtgtgccaccacacctggctaattttttgtatttttagtagagatgaggtttcaccacgctggccaggacctcctgacctcaaatgacccacccgcctcggccttccaaagtgctgggattacaggcgtgagctactgcgcctggccaagagtgaaagtttaacaggtgaaagaatacctgtctctgctgcagagagaggggtcctgaacaggttgctggttttgaggtgaaatgcagggcgttttatagatgcttggtgagcaggcagtgtctgatttacatagggcttgaaagattggttgggccaggtgtgctatttgcatagggcgcaaaaactgtttaggactaggtgtgccatttgcatagggcgcgaatttctggaagtccccccaccttaatctttcattatgtaggtaggttctctgcctggcctgcaccatcatgcccgtttattttttatctatttatttattttttactgtacacgtgataataaaagggaagatggagactccatgttgaacatgcctggccctcaggtagcccttttctattggcacagctgctggcattttctcatgcaagcttccagcttgcttatctatgtttgcagctcaatttctcaggatgctcgttgttaaaaataaataatttcttgggctgttttttttgtgtgtttgtttgttttctttgagctggagttttgctcttgttgcccaggctggagtgcaatggcgcaatcttggcttgctgcagcctccgcctcccgggttcaagtgattttcctgcctcagcctcctgagtacctgggattataggcacccgctaccatgcctggctaattttttgtatttttgtgtgtgtatatatatatatatatatatatatatatatatatatatatatgtattttttttttttagtagagacggggtttcgctatgttggtcaagctggtctcgaacttctgacctcaggtgatccgcctgcctccgcctcccaaagtgttgggattacaggcgtgagccactgagcccagcctgggctgctttttgttaaaagggaagctctgacaaggactctcttaccctcactagctgcctaaataatgtctttctatctcctgtatcaatatttgggtgagggtgattttaggcagcatgtgggggcctccatcacccatcatctgtatccttcctgtttttttctttatcaaccacccaccaaggagaccttcctgtgtcccttgcccaccgctcccaggggacctgttttttttttttttttctttgagacggagtcttgctctgtcacccaggctggagtgcagtggtgagatctcggctcactgcaatctcggcctccagggttcaagcaattctcctgcctcagccccctgagtagctgggattacaggcgcccgccaccactcctggctaatttttgtatttttagtagagatgggatttcaccatgttggccaggctgatctcgaactcctgacctcaggtgatcttcccgcctcggcctcccaaagtggtgggattacaggcatgagccaccgcacctggccaggacccggtttattggccacagttccccgcctctcccctttcttccttcccttgctctcctgtcctgccccatctggtctgctccagaaggggctgcattcgcactctgtgagcagagcagcctcagagggcccacgtgggacctgaggtggggaaggaaattctgagtggtgtctgcaccttgccacagtctgctggttgggagaccagatgctctgggggattcagtttcagggaaggaggaaaaacaaggtcagtgaggcctcagcagaagactcccagggcaagccccgcttctgcttatggggcagacagaacacttgtctttaatccaggcaggagtgctactgacacccagcgtttgatgctgtgtgcattgagagtggctggctggtattggagggatgagagagcctggaggggcggggctttaggggtggccttagacagggcttggcaggcaggaggtcactcactcattcaacaaacattcattgagcacctaccgtgtggcaggcagtgaacaagacagacacaaatccctgccctcatggagttgagctgctaataggtggaagacaggcagagaacaagattaggaagtgaggtatgtgcaatgtgagatatgataagactgtgacaatggttaaggggaaaaatggcagacagagtggatgagaagggatggtctggaattttatttttattttatttttttgagacagggtctcactttgttgcccacgccagagtgcagtggcacaatcacagctcattgcagccttgaattcctgggctcaagggatcctcctacctcagcctcctgagtagctaggactataggtgtgtaccaacatgcctggttaattttttcattaatatcacagtgcgtaaaccctgtgatatgataaatatcagagggatatttcattaattttgtagaggcagggtctccctaccttacccaggctggttgttcatcatattggtcaggctgttcttgaactcccgacctcaggtaatccacctgcctcagcctcccaaagtgctgggattccaggcgtgtgtcaccatgcccagcctgatcctcctctttattgcaatcccccatgtacatgtgattcctttctccttctttctttttcttctttttctgtttctactttatttttatttttatttttttgagatggagtttctttctgtcacccaggctggagtgcagtggtgcgatcttggctcactgcaacctttgccttgcaggttcaagcgattgtcctgcctcagcctccgtggtagctgggattacaggtgcacaccaccacgcccagctcattttcgtatttttagtagggacagggcttcaccgtattggccaggccggcctcaaactcctgacctcaggtgatcccctggcttcggcctcccaaagtgctgggattacaggcatgagccactgtgcctggccatctacttctttttcttttcttgtttttagagatggggtctcactatgttgcccaggctggagtgcagtggctattcacaggcgtgaccataatgcactgcagcctcaaactcctgggctccaggactcctcccatctcagcctcctgagtagctgggactataggctcacaccactgcacctgtgtttttcttctttttctatttgtgactatctaacataacttctaatgtagttgagttatttattttattcactctctttctccctgttgctgctcccatgggtaaaattttttgttgttgttcaccagtgtatttcggttcttatgtgttagagcctaacacagagtaggtggtcagtacttatctgttgaatcaatgaatgaacaaatgaatccctgtttgacatatcaggagactaatgctcagagatgttgttctgcacccccaaggtgacacagcaagaatgggcctgagctggaagcagcctgggctcatagccttgttatttcagtgaatggggctggattccaacatctgttcctgaatacctactgtgtgccaggtcccgagggatggtattggccaggtagctatcacccctataccatgagaccacccagcctttattgtaagaaggtccccttacctctaagagtgctttttttttttttttttttttttgagacagagttttgctctgttgcccaggcttgagcacagtggtatgatcacagctcactgcatcctcaatctcctgggctcaagcgatcctcccacctcagcctcccaagtagctggatctacaggcatgcaccaccatgcccagctaattaaaaaaaattttttttttgagagaagtctcgttcttgtcccccaggcttgagtgtgatggctcgatctcggctcactgcaacctctgcctcctgggttcaaatgattctcctgcctctgcctcccaagtagctgggattaaggcgcctgccaccacgcccggctaatttttgtattttttagtagagacagggtttcaccatgtttgccaggctgatctcgaactcctgacctcaggtgatccgcccacctcagcctcccaaagtgctgggattacaggcgtgagccaccgtgcccagcctaaaaaattttgtttttctgtatagttggggtctcactttgttgtccaggatggtctcaagctcctggcctcaagagatcctcctgccttggcctgccaaagtgctgggattataggcatgaggcaccatgctcagcctaaaaagtgctcttgatgggcagatataccgtcagtctttttgacctattgacctgtccctccccctgttactattccccttctcctatcctcctatgtctgtttgcagctgctccccacccccatccatctggagcctgattagcttgtgtgtgcttagcagatgttggctgaacagacgggctctttcttccttctcagacaggtctccattttcccatctctagaatgggtacagtcacatttgccctcctacaggttggaatgggtacagtcacgtttgccctcctacaggctgggaaggctctatgacatcaggccatgtaagaggggaaagcccagcccctagagtcagctttgaatggaaagggaggttaatctgctgctgccctcctacctcaattaagaccggggctaccccattgcccacgtgcggtgcgggggaaggtttttccatttgttagaggctctcacttgcttatactgagcctgtcaggtaagaaatacattctattttgtttgagacactcttgttctgagtctcagttatggaaacccaacctaatgttccccatgggcctgatgaatgttccttgttgttgaagccaatctgagttgcatttcctcttacttttagtaaaaacctctacaaagggaaattggggtcttgccccttggggtacatattagtttcctatagtgactctaacaaattactcataaattgagtgactcggaaccacagaaataataattattattattgttactattttgagatagagtcctgctcttttgcccaggctggaatgcagtggcgagatcttggctcactgcagcctccgcctcccgggttcaagcgattcttctgccgcagccacccgagtagctggcattacaggtgcccgctatcatgtccagctattctttttttttttgtaactttagtagagatgggatttcatcatgttggccaggctggtctcgaatgcctgacctcaagtgatccacctgtctgagcctcccgaagtgttgggattacaggcgtgagccaccgcgcctggccagaaatggattatatggattattttattttatttttttgagatggagtttcactcttgttgcccaggcaggagtgcaatgatgtgatctcggctcactgcaacctctacctcccgagttcaaacgattctcctgcctcagcctcctgagtagctgggattacaggtgcgcgccaccatatctggctaattttgtatttttagtagagatgggatttcaccatgttggccaagctggtcttaaactcctgacctcacgtgatccacccacctcggcctcccaaagtgttgggattacaggtgtgagccactgcacccggccagattattttatagttctggagtcaggagaccaacatcagtctcactgctgaaacccaggtgttcatgggctgggccatgcttctttaagaggctgcagcgtgagaatccattttcttgctgtttccagcctctgcagttgcattctttagcatatggctccttcttgcatcttcaaagccagcataactttagtgaccacattgccttttttttgtgtcaaatctccttctgtttcccttctacgaggacccttgtaatgccatttttttttttttttgagacggagtctcgctctgtcacccaggctggagtgcagtggtgcgatctcggctcactgcaagctccacctcctgggttcacgccattctcctccctcagcctcccgagtagctgggaccacaggcacccgccaccacacccagctaattttttgtatttttagtggagacggagtttcactgtgtaagccaggatggtctcgatctcctgacctcgtgatctgcctgtctcggcctcccaaagtgctgggattacaggcgtgagccacgatgcctggcctgtaaagccatttaaggcccacctaggtaatccaggataaaccatccatctcaagacccttaattaattaattaatatttaatgttttttaaaaaattaatttatttatttattgagacagagtctcactctgtcactcaggctggagtgcagtggcgtgatctcggctaactgcaacctccatctcccaggttcaagcgattctcctgcctcagcctcctgagtagctgggattacaggcgcctgccactgcgcctggctaatttttgtatttttagtagagactgggtttcaccatgttggccaacctggtctcgaactcctggccttaagtgatccatccacctcagcctctaaaagtgctgggattccaggcgagagccaccacaccaggccagttgtcattattccttctgtgcgtgaatccaaactggggagaaaggctctgtgtgtatgtgtgtgtgtgtgtgtgtgtgtgtttgtgtgagcacgtgtgaggtctgagggcttcctgtcaaaatgaatttgcatgtatttgactttgaaaggaaaagggaactgagagagcccccagacgcctgagtcggagagacagggggcagaggttgccaagccctggctgccacttgtcaggttccctgtgctagacatgcataatctgtattccatcactgggtacccggacccaccaggtaaggccccggccaggctggggctggggcctaggtgtggtcaggacccagggtacagaatccccaccatggggcagctgaggcagagaccagggcttgagggatggagggaggagggaatggctgggctctgacttgcctttcccctggaagggaccatggaggaggaggaggaggatgatgactatgagaactcaacacctccctacaaggaccttcctcccaagccaggtaagaggactttttggagtgtgacctgggggaatacagggaatggggtctccagtgggcattggttgggcattgtagacacatagtcagtctcctctgtatccagcccatgccgggcactgtggaacccacaccctgcccaggacgacctgtcagtctgatggcggaggtgggtttgggcacagtcttggtgagcagggtgagagaggaggggtcaggagattggcaaaatccttgggggactgagggctcaaatagaggaagggactttggggtggggcttgagggatgagtagacatatcttaagaagagaagtccaggagagaacagttaggtgcaaagtctctgagttacaaaagctggtgcttgagaaactgggagtggactgtgggctcccagtctcctcacctttctacccaaagcccaggttttatttagacttggatctcaaacccaaggcatagcacagggttcaacaagagactgataagtggttgttaaagtggaggtttgggccagctgcagtggtgtgcgtctgtagtcttgatactttgggaggtcaaggtgggaggatcgcttgaggacaggaatttgagaccagccagggcaacatagcaagaccctatctctgccaaaaaaaaaaaaaaatagaggtttgggccgtgtgtggtggcacatgtctgtagtcccagctacttgggaggctgagtcagtaggatcacttgagcccaggagttctgggcgattgtgaactaggcgatcgggcgtctgcactaagtttggcatcaatatggtgatgttttgggagcaggggaccaccaggttgcctaaggtgtctgaggaggggtttccaggttggaaacggagcagttcgacacccccaagctgatcagtagtgcgactgctcctgtgagtagccgctgcactccagcttgggcagcatagcgcgactccacttctaaaaaaatagagaaaatgaaaccggaggtttttgaggtattcctgagtttactgccaccagggaccctgaggccatgagagatcccggaggcccaaaacagaaaatccctgagatatgctgatggcctggtcctggtgaccttagacaggagccattctgtgagggctgaggctgtatatcccccatctctgagtccaaagtggggccacctgggaggtccagaaatatggtgggacttgcctgaggtaggaggtgacctgtgctgtgttgtttcactgccccatttccaatttatggtcctaatgtgaccctcaagccctgggtctacatatatgaccaaccaatcccattcccttcttcagggccacgtctgctccaaaagcacagtcctgtccccacatccacatgcagcccagcatccactctccaatccaacttcatcaccctctctactatagcccagcctcgactccttccccattcccaaacctggcaaggactctgttcttcatcctaaccacatcatgaccttacccacatccatccctgtccccaacccattttccatcccatcccaccccatcccaacaccaattctaatccaaaccccacctcatcttcatccccatcctgaaacgcaactgtttttgttttttaaaatcccctccatccccttccatcccttctcctttcaatcaaaccctcaaagagacacacagagaagagaactgtgaattgtctgctcattagtttttatgagaggaaaccagagaatttaaaaaaaatatttttgagacagggtcttgcttgtcacccaggctgccctgaagtggtgcaatcatagctcactgcagccttgagctcctgggtccaagcaatcctcctactacaccctcccgagtagctggggttacaggcatgagtcactgtctgtaaagcctcatgtgaagctcagggtctacatatatgactcatatgactctcagggcctgtaagttctgcagagatgactgtggtagtcagccttcaagatgggttccctgtgacccttacgttctcatattcgtgcccttgtgtagtctcttcccacaatgactcagagctggtccatgtgataaatagaatactgtatagtggagaccatcctttgtgacttgtgaggctagatcataggagcatggtggcttctatctttgcctctgccatgttgtgaagatgcccagtcatccctttggagaggctcacatggcaaggaactgaggcctcccaccaacagccatgtgagtgcatcatcttggaagcagatcctctagccccagtcaagcctgcagatgacttgcagtcccaggcaacatcttgactacaatcacgcaagagatctcaagctagaactacccagctaagctgctctcagattcctgaaccacagaaactgtgagataataaatgcttatggttgttttaagtcactgcgttttggggtaattggttgtgcagccatagataactgacccagtgccctggtacttcaccatggaatgtgggggaatacttaacacctatccccttaacatcttgttacaaatgttaccacttccaggaggtacttcctgatgacctctctacattagcttttatcctatcccattgctctgttttattaggtttagagcagtaatacttagtctatataaaaacatattttaatgtttcttaatttctttactttttttttttttttttcttgagacggagtttcactcttgctgcccaggccggagtgcaatggtgcaatcttggctgacagcaacctctgcctcccgggttcaagtgattctcctgactcagcctccctggcagcgggattacaggcatgtgccactgtgcccggctaattttgtatttttagaaaagatggggtttctccatgttggtcaggctggtctcgaactcccgacctcaggtgatctgcctgccttggcctcccaaagtgctgagattacaggcacgagccaccacgcccagcctcttttctacttttttaagagtggggtctccctctgttgcccaggctggagtgtagtagtgcaatcatggctcactgctgtgtcaacctcctgagctcaagcaatcctcccacctcagcctcctgatagctgggactactggtgtgcaccaccatgcctggatggttttttctaaattttttttacagagatagggtcttgctatgttgcccaggctggtcttgaactcctggcctcaagcgatcctcctgccttggcctcccaaagtgctgggattataggcatgagccattgcgcccagcctatttctatgtctctttactggtttattgtgtctctggtctagattgaaggaagaagtttatccatctcttccacccagaacttggtgctctgtaggggagctcaactgggagcggggaggtgggtggctgttgtcattgtttcttctttttctttctttctttctttttttttttttttgagacagaatctcactctgtcactcaggctggagtgcagtggcatgatctcagctcactgcaacctccacctcctgagttcaagtgattcacctgcctcagcctcacaagtagctgggattacaggcaggcaccaccacgcccggctagtttttgtatttttggtagagacggggtttcaccacgttggttgcccaggctgatctcgaactcccaaactcaggcgacctgccagcctcagcctcccaaagtgctgggattacagacgtgagccaccacccccggcccattgtttcttctatgtgtgagtccaaactccagagaaagatgtgtgtgtgtgtgtgtgtgtgtgtgtgtttgtgtttgtgtgaggtctgggggcttccccccaagatggatttgcctgtacttgactttgaaaggaaagggaaacagacagatgccttagacatctgagtaggagagacaagacctggctaccccttgtcatgttcctggtgttagcggtagccatgcacaacctgtattctatctctgggtgtccagacccaccaggtaaggccctggccaggctggggctggggcccaggtgtggtcaagatccagggtacagaatccccatcatggggcagctgaggcagagaccagggcttgagggatggagggaggagggaatggctgggctctgacttgcctttcccctggaagggaccatggaggaggaggaggaggatgatgactatgagaactcaacacctccctacaaggaccttcctcccaagccaggtaagaggactttttggagtgtgacctgggggaatacagggaacggggtctccagtgggcattggttgggcattgtagacacacagtcagtctcctctctacacagcccatgccgggcactgtggaacccacaccctgcccaggaggacctgtcagtctgatggcagaggcaggattgggcacagtcttggtgagcagggtgagagaggaggggtcaggagattggcaaaatccttgggggactgagggctcaaatagaggaagggactttggggtgagacttgagggatgagtagacatttcttaagaagagaagtccaggagagaactgttaggtgcaaagtccctgagttacaaaagctggtgcttgagaaactgggagtggactgtgggctcccaatctcctcacctttctacccaaagcccaggttttatttagacttggatcacaaacccaaggcatggtacagggtccaacaggagactgataagtggttgttaaagtggaggtttgggccagctgcagtggtgtgcatctgtagtcttgatactttgggaggccgaggtgggaggatcgcttgaggacaggagtttgagaccagccggggcaacatagcaagaccccatctctgccaaaaaaaaaaaaaaaacaagtagaggtttggaccgtttgtggtggcacatgtctgtagtcccagctacttgggaggctgagtcaggaggatcgcttgagcccaggagttctgggctattgtgaagtatgtgattgggcatctgcactaagtttggcatcaatatggtgatgttttgggagcagggaccaccaggttgcctaaggtgtctgaggaggggtttccaggttggaaacagagccactcgacacccccgagctgatcagtagtgcgactgctcctgtgagtagccgctgcactccagcttgggcagcatagcgcgaccccacttctaaaaaaatagagaaaatgaaaccggaggtttttgaggtattcctgagtttactgccaccagggaccctgaggccatgagagatcctgggggcccaaaacagaaaatccctgagatatgctgatggcctggtcctggtgaccttagacaggggccattctatgagggctgaggctgtatatcccccatctctgagtccagagtggggccacctgggaggtccagaaatatggtgggacttgcctgaggtaggaggtgacctgtgctgtgttgtttcactgccccatttccaatttatggtcctaatgtgaccctcaagccctgggtctacatatatgaccaaccaatcccattcccttcttcagggccacgtctgctccaaaagcacagtcctgtccccacatccacatgcagcccagcatccactctccaatccaacttcatcaccctctctactatagcccagcctcgactccttcccccttcccaaacctggcaaggactctgttcttcatcctaaccacatcatgaccttacccacatccatccctgtccccaacccattttccatcccatcccaccccatcccaacaccaattctaatccaaacctcacctcatcttcatccccatcctgaaacgcaactgtttttgttttttaaaatcccctccatccccttccatcccttcccctttcaatcaaaccctcaaagagacacacagagaagagaactgtgaattgtctgctcattagtttttatgagaggaaaccagagaatttaaaaaaaatatttttgagacagggtcttgcttgtcacccaggctgccctgaagtggtgcaatcatagctcactgcagccttgagctcttgggtccaagcaatcctcctactacaccctcccgagtagctggggttacaggcatgagtcactgtctgtaaagcctcacatgtgaagctcagggtctacatatatgactcatatgactctcagggcctgtaagttctgcagagatgactgtggtagtcagccttcaagatgggttccctgtgacctttacgttctcatattcgtgcccttgtgtagtctcttcccacaacgactcagagctggtccatgtgataaatagaatactgtatagtggagaccatcctttgtgacttgtgaggctagatcataggagcatggtggcttctatctttgcctctgccatgttgtgaagatgcccagtcatccctttggagaggctcacatggcaaggaactgaggcctcccaccaacagccatgtgagtgcatcatcttggaagcagatcctctagccccagtcaagcctgcagatgacttgcagtcccaggcaacatcttgactacaatcacgcaagagatctcaagctagaactacccagctaagctgctctcagattcctgaaccacagaaactgtgagataataaatgcttatggttgttttaagtcactgcgttttggggtaattggttgtgcagccatagataactgacccagtgccctggtacttcaccatggaatgtgggggaatacttaacacctatccccttaacatcttgttacaaatgttaccacttccaggaggcacttcctgatgacctcgctacattagcttttatcctatccctattgctctgttttattaggtttagagcagtaatacttagtctatataaaaacatattttaatgtttcttaatttctttacttttttttttttttttcttgagacggagtttcactcttgctgcccaggccggagtgcaatggtgcaatcttggctgacagcaacctctgcctcccgggttcaagtgattctcctgactcagtctccctggcagcgggattacaggcatgtgccaccgtgcccggctaattttgtatttttagaaaagatggggttcctccatgttgctcaggctggtctcgaactcccgacctcaggtgatctgcctgcctcagcctcccaaagtgctgagattacaggcgtgagccaccatgcccagcctcttttcttttttctttaagagtggggtctccttctgttgcccaggctggagtgtggtagtgcaatcatggctcactgctgtgtcaacctcctgagctcaagcaatcctcccacctcagtctcccgatagctgggactacaggtgtgcaccaccatgcctggatggttttttctaattttttttttttttttacagagatagggtcttgctatgttgcccaggctggtcttgaactcctggcctcaagcgatcctcctgccttggcctcccaaagtgctgggattataggcatgagccactgcgcccagcctatttctgcgtctctttactggtttattgtctctctggtctagattgcaggaagaagtttatccatctcttccacccaggacttggtgctctgtaggggagctcaactgggagaggggaggggtgtggctgttgtcatagtttcttctttttccttttcttctttttttttttttgagacagagttttgctctgtcgcccaggctggagtgcagtggcgcgatctcggctcactgcaagctccgcctcccaggttcacgccattctcctgcctcagcctcctgagtagctgggaccacaggcgcccgccaccacgcctggctaattttttgtatttttagtagagacagggtttcaccatgttagccaggatagtctcgatctcctgaccttgtgatctgactgcctcagtctcccaaagtgctgggattacaggcgtgagccaccgcgcctggcccttttttttgagacagaatctcactgtgttgcccaggctggagtgcagtggcgctatctcggctcactgcaatgggggctattgtcattgtttctccttcctctttttttttttttttgagacagaatctcactctgtcactcaggttggagtgcagtggtgcgatctcagctcactgcaacctccacctcctgagttcaagtgattcacctgcctcagcctcacaagtagctgggattacaggcttgcaccatcatgcctggctagtttttgtatttttgttagagacggggtttcgccatgttggttgcccaggctgatctcgaactcccaaactcaggcaacctgccagcctcagcctcccaaagtgctgggattacagatgtgagccaccactcccggcccattgtttcttccgtgtgtgaatccaaactccggagaaaaatgtgtgtgtgtgtgtgtgtgtgtgtgtgtgtgtgtgtttgtgtgaggtccaggggcttccccccaagatggatttgcctgtacttgactttgaaaggaaagggaaacagacagatgccttagacatctgagtaggagggacaagacctggctaccacttgtcatgttcctggtgttagctgtagccatgcacaacatgtatactatcgctgggtgtccagacccaccaggtaaggccctggccaggctggggctggggcccaggtgtggtcaagatccagggtacagaatccccatcatggggcagctgaggcagagaccagggcttgagggatggagggaggagggaatggctgggctctgacttgcctttcccctggaagggaccatggaggaggaggaggaggatgatgactatgagaactcaacacctccctacaaggaccttcctcccaagccaggtaagaggactttttggagtgtgacctgggggaatacagggaacagggtttccaggaggcattggctgggcattgtagacacacagtcagtctcctctgtatccagcccatgccaggcactgtgcaacacacaccctgcccaggaggacctgtcagtctgatggcagaggcgggtttggacacagccttggtgagcagggttgagagaggaagggtcaggagattggcaaaatccttgggggactgagagctcaattagaggaagggactttggagtgggacttgagggatgagtagacatttctttctttttttctttttttttgagatggaatttcactctgtcacccaggctggagttcagtggcacaatctccgctcactgcaacctcgcctcctgggttcaagcaattcttttgcctcagcctcccgattagctgggattgcaggcgcctgctaccatgcctggttaacttttgtatttttagtagagaccagggtttcaccatattggccaggatggtctcaaactcctggcctcaagtgatccgcctgccttggcatcccaaagtgctgggattacaggtgtgagccaccacgcctggccgagcagacatttcttaagtagagaagcacaggagagaattgttggctgcaaagtccccgagtcataaaagctggtgcttgagaaactgggagtggcctgtgggctcctcaatctcctctcattaccactcaaagcccagggctttatttaatcttgaatctcaataaacccaaggcatagcccagggttcaacaagaatctgatcagaggatataaaagtggaggtttgggctggttgcagtggtgtgtgtctgtagtcccactgctttgggaggccaagatgggaggatcacttagccatgagttcactggaggccaggagttcgagaccagcttgggcaatatatagcaagacgcccatctctaccaaaaaaaaaaaaaaaaaaaaagggaagtttgggccaggcgtggtggctcatgcttgtaattctagcactttgggaagccaaggtgggagcatcactggagccccagaaaagagaccatcctgggtaacacagtgaaacccccagctatatgaaaacattttttttttcaaattaaaaaaattagccagttgtgggatgtgtgcctgttgtcccagcttctcaggaggccgaggtggtaggattgctagaacccgggagttcaagggtgcagtgagctatgatggcaccactgcactccagtctggatgacagagcaaggcactgtctttaaaaaaatagaacacgggctgggtgcggtggctcacgcctgtaatcccagcactttgggaggctgaggcgggtggatcacgaggtcaggagattgagaccatcctagctaacacggtgaaaccccgtctctattaaaaaaatacaaaaaattagctgggtgtggtggtgggcacctgtagtcccagctacttgggagactgaggcaggagaatggcgtgaacctgggaggcggaggttgcagtgagccaagatcgcgccactgaactccagcctgggagacagagagagactctgtctcataaaacaaacaaacaaacaaacaaacaaacaaaaacatggccgggcacggtggctcagccctgtaatcccagcactttgggaggccaaggcgggtggatcacttgaggtcaggagttcgagaccagcctggccaacatggtggaatcctgtctctactaaaaatataaaagttagctgggcgtggtagcatacgcctgtaatcccagctgagggggctgaggcagaattgcttgaacccagggggcggaggtttcagtgagatgagatcacgccactgcactccagtctgagcaacagagcaagactctgtctcaaaaaatataaaataaaataaaaaataaaataaaatagggagatacccaggcaatctaggttcgttggtcaccctacttaatcccatctccatccctaatcccaattgcattcttacgtccaaccccgtctgtaacctaatctccaatcctccactgcaatcctaaccctgtttccatcacttcctcttggcgcattcccatcctcagcccagccctcaccctgagcttctcttctccaggttcaagtgctccaccaagacctccaagggcaggtgagttggggctgggggtgtaggagacccagagctggctttgccctgctctggccctgaccaaccattcctccctcctcagcaaaggaaacagagaaacccccacttccttgcaagccccggaacatgacaggtgagagctgacagttggagtcttcctgctcacctggctgaagcccttcttgaaatgactttctcatctcttctaggcctggacctcgccgctgtcacctgtccacctcctcaactgggtgagcagtgggaagaccctttaagatgcctaagaggggatacctggatgtttcctttcaatcccccaatttttatttatttattttttttgagacagagtctcactgtcatccaggctggagtgcagtggtgcgatactggctcactgcaacctctgcctcctgggttcaagtgattctcctgcttcagcctcctgagtagctgggactacaggcacgaaccaccacacctggctaagttttgtatttttaatagagatggggttttgccatgttggccaggctggtctcaaactcctgacctcaggtgatccacccgcctcagcctccgacagtgctggaattacaggcgtgagccactgcccacagccagccccctaaattctgaccagagaacaaaacagaggttgttgatcttggaagacagagtctttggcatcttctgaataaacctctctccccctttctcccagctgtgaatcttgagccttctccattgcagccatccctggccggtaagtgtcctcccatttcccctctgacagtggctagtgtatctgattgagacctatggctctacagtgagaccctgagtcagaggaacttctcctttaagaagctgctccttcaggacctgctgcactgttctgagttagtctagtgagcgctgctctaagtgagaaagccattccttgacatcagagtttgcaaacgtgtattcttttttgtccttctgaggaccagagttatgtggttgttttgtttttgataatgatgatgtacttatggttctgttggtgattgtgatggaaggatgaggaaggagatgatggaaaggaagaggatggttggtggtagtaacgatggtagaggtagtgatggcgttgttgtgtgctgatggtgatggtggagatactgatgatggtggtgatggtggagatagtgatggtgttgttggtattgatgatggtaatgatggtggaaacagtgatatggtggtaatgcagggcggaggtagtgatggtattgttggtgatggtggtggtggtgatgatgaaggtagtgatggtgttagtgagatggtgatgatgatagtggtggtagtgatggtgttggtggtgatggtgttggtgatgatagtagaggcagtgatggtattgttgacaatgacaatgttgttggtagagatgatggtggtgatggtggaggtagtgatggtgttggtgatgaccatgtttaaaaagaaaaagaagcttctcctctctgagtctaggccagatctccagaaactcaggtatctgcttgcataagatatgggaaatgttctctgctctagaagccggggtccacaagcttccttgacctaggagcaacttggtcaggggtttctggagagtagaagatgatgcatcatagatattaagaacaaagctgtgtccaagtcatgcctaacctcaccaagcctcagtttactcacttgcaaaatgggaataatgcttataacctacatcataaggatgagactccaataagataggaaggatgtaggttgggtacagtggcttacgcctgtaatcccagcactttgggaggctgaagcagggaggatctcttgatgccaggagttcaagaccatcctggacaacatggcgagacccccatctctgcaaaaaaataaaataaattagctgggcctagtggcacacatctatagacccagctacttgaaagggtgaggtgggaggattgcttgagcccaggcattagaggttgcagtgagctataactgtgccactgccctccagcctggatgacagagtgaaaccttgtttcaagaaggaaagaaggaaaaagagaaggatgcaacatgatgcttagcgcaccgtaaatgcatcaaaaagaccctgagcctccccagggttcactctccctaaccctctcttgctgacttcatctgctgaaacagtcatgactacagacttctgccccctgctcttggacaaagacttaagagtctcttccttactctctgaagccccagtatcagtctctctgttcccatccccactccccagcaactccagtcccctggctcaatcagaggtctggaggtcctggctgctgccagaagaggtggatggtgtacctgtgtctgctggtggtgacttccctgttcctgggctgccttggtctcactgtgaccctgattaagtgtgagtagggccaggaagggacatggggagagattggggagggtgcacaggaggacctgggctcaatttggactcttcttcatagaccaggagttgatggaagaactgagaatgttaagctttcagcagatgacgtggcgaacaaatagtgagtgctttcagtcattccttcatgccactcctattgagccctaacccaatcctcagatccaactccaagatccaacctcatccccatctttgctgggcactgtgctaggtaccagggggttaaaatggtaaacatgtcagacacagtctttgtctgactgtgtgaagtgtgcatgtgtatatgtgtccagacctccaccatccaatatggtggccacaagccatatgtggctgttgaacacttgaaatgtggccagtccaaactgagatgagcactaagtatgaaatacacactggtccaggtgcagtggcacatgcctgtaatcccagcacttttggaggctgaggcaggattgcttgaggccagaagttcgagacccgactgggcaacacagcaaggctccatctctaaaaaaaattagccgggtgtggtggtgtgtggtgtgtgcttgtcatcccaactactcaagaggccgaagtgggaggatctcctgaatcagggagtttgaggttgatcatgagccatgatcacactcaagagatcctcctgcctcagcctcttgagtagctgggacataggcgcatgccatcacacccggctggttaaaaaattttttttttgtatagaagaggtctcactatgttgactaagctcgtttcaaactcctggcctcaggtattcctcctgccgcagcctcctgaagtgtttcgtgcctggcctaaaacctgtgtttctgttttgtccaactgaagggccagctactgagctagcgagtgttgaaaaagggaagagttcgtgggggagtagtgataatacacacgttaattatagaagaatcttttgacctgggttggccttcatcatgactgccaaagtctgaatatttctccattccacactgcctcaccctatgcttcataacaagcaagctcaaaacccatcaatggcttctcattgtccagagtccaaggtgaaacctttagcttggcattcaaggatccacatattaggctgggcacagtggctcatgtctgtaatcctagcactttgggtggccaaggtgggaggatcccttgaggccaggagttcaagaccagcctgggcacagcaagactttctttcgtttgtttgttctttctttctctctctctctctctctctcactatctctttctttctttctttctttttctttttccttcctttcttccttccttccttcccttcccttctccttccttccttccttcctttcttctctccctctttctccttccttccttctttccttccttcttactttctttctctcttgctttctttcttttgacagaattttgctcttgttgcccaggccggagtacagtggcgcgatctcagctcactgcaacctccccctcccaggttcaagtgattgtcctgcctcagcctcctgaatagctcagattacaggcatctgccaccactcccggctaattttttgtatttttagtagagatggggtttcaccctgttggccaggctggtctcgaactcctgacctcaggtgacccatctgcgtcagcctcccaaagttctgggattatgggcatgagccactgcgcccggcctagcaagaccttgtttctacaacaaattttaaaaaaatagccagtcatgatgtcatgtacctgtagtcccagctactcaggaggctgaggtgggaggatcacttgagcccaggaggttgaagctgcagtgaaccacgattgcactccagcctgtgggacagagcaggactgtgtctaaaaaaaataaaataaaggatccaggcatctgagctcattctgctttgatctcaagcttttctgagttttccctccactcttataggctttgccgcctcaccacaacatacttgcctctgtatctttgcttttttttttttttttttttttttttgagatgaagtctcactctcttgcccaggctggagcacagtggtgtgatcttggctcactgcaacctctgccttccgggttcaagtgattctcctgcctcagcctcctgagtagctgggattacaggcatgtaccaccacgcccaactaatttttgtatttttagtagagacagggttttaccatgttggccaggctggtcttgaactcttgacctcagatgatccgcccacctcggcctcccaaagtgctgggattacaggtgtgagccaccatgggcagcctgcatctttgcttttaagatagtccctgcctaatgtgcctcttcctcacctcacagttatcgaatcactttcttcctttaaaacccacttctttcagggtgcccaccacccctacttttccccacatccccgggattgatccctcctctgagccattctcggattctgagcactgtacatgtggtttttgagcgcaagcgtgacccactggaatgtggacacagtggggaacacaacccttgcttctctctctgatgtgtctgcagtccgtggtggatgggtaggatgggttctcagtctgtagccctcaagcccatcccttctgacagtgactggcatggcagggctagctggcctgaagcatgacattgcccgtgtaagagctgacaccaaccagtccctggtggaactttggggcttattaggtaagtgagacttggggaattgcccagggatggggggcatggcagagctggcacattacatcactccattgaagtcattctcagtgcagtctatgtgaatggtgcccctccccctcaccggagttgagcagtgtacagcctgcacaactgtacatggcatactatgtacatggctcaggttctggggccatcctgacagcattctgtctggttcccagactgccgccgaattacctgtcctgaaggctggctgccctttgagggcaagtgttactacttctccccaagcaccaagtcatgggatgaggcccggatgttctgccaggagaattactctcacttggtcatcatcaatagctttgctgagcacgtgagttcttcccactgaacctttgagaaccttcagggacagcctgcttctcttccaggatgcacacatccctcccttccctggatggcaagaaattagaattacttttcagttactaaaactttaacagcaagctcttcctaaggtagtatcatgcagaggttaagaagacatgctttgtttttgagttcaaattctggttgtgttgatttaacctctgtacatttcaagtatcggttttatctctaacatgaaaatacaataattaatatctgttaggtagcactttttatgtttcaggttgcattccaaatactttacatcttacagtcattaacacatgcaatcctcacgacaacctatacattagtatgccagtcggaagagtttatttcttttcttttcttttttttttttgagatggagtctcgctctttcacccaggctggagtgcagtggctggatcttggctcactgtaagctccgcctcccgggttcacgccattctcctgcctcagcctcctgagtagctgggactacaggtgcccaccaccacgcccggctaattttgtttttgtatttttagtagagacagggtttcactgtgttagccaggatggatggtcttgatctcctgacctcgtgatctgcccgcctcggcctcccaaagtgctgggattacaggcgtgagccaccacgctcggccttctttttttttttttttttttttttttttttgagatggagtctcactctgtcacccaggctggagtgcagtggtgcaatcttggctcactgcaacctctgcctcccgggttcaagcaattctagtgcctcagtctcccgagtagctgggattgcaggcatgtgccaccacgcctggctaacttttgtattattagtagagatgaggtttctccatgttggccaggctgttctcgaactcctgacttcaggtgatcctcccacctctgcctcccaaagtgcggggattataggtgtgagccaccacgctgggctaggaggggttactttatgctgcggtaacagacagtctccatagtccaatggtgaaagtagacgagggaaatcatacattgactgtcagagtttccatttacttttgctcacaaaagtcacatgtacacgcctatcttttaaggtggtagggaaataagtctcacctccgtgcaaccagaaggaggattggaatatgggtaaatagctttaatgatttgctactacaatttaggtagtattactatttgtacacaatatgtatcatctgtacttcacaggtgaggaagtcaaggttccagtacatgtaagcaacttgcctggagtcacttacagctagtgggatttaagcctaggtagccggctttcaagtccatggtcttgaccatagacataggactatagtatggtttatgtttccttttttctgtttttcagggacaaggtctcactctgtcactcaagctggagtgcagtggtataatcatagctcgttgcagcctcaaagtcctaggctcaagcaattctttcgcctcaccctcctgagtagctaggacaaccaggcacttgccactgtacccagcaaattattattattattattactttttgagatggagtctcgctctgtcacccaggctggagtgcagtggcgcgatctcggctcactgcaagctctgactcccgggttcacgccattttcccacttcagcctcccgagtagctgggactacaggcgcccgccaccacacccagctaattttttgtatttttagtagagacggggtttcactgtgttagccaggatggtctcgatctcctgacctggtgatctgcctgcctcggcctcccaaagtgctgggattacaggcatgagccaccgcgcctggcccagcaaattatttttacttttgtagagacagggtcttgctatgttgcctaggctctatgttttctattcattttatttttaatttatttatgtcattatatttaaaatgttttttttttcccagacagtatatagttgggtttggatttttaaaatctgatctgataatctctggcttttaattggtgttttcatttacttatttatgtatttttggagacagggtctcactttgtcacccaggctggagtgcagtggcgcagcctcagctcatggcagccttggcctcctgggctcaagtgattatcccacctcagctccccaccaagtagctgggacaacaggtgtgtgccaccatgcctggataatttttaacattttttgtagagatgaggttttgctatgttgcccaggctggtctggaactcctgacctcaagtgatctgccgccttcacctcccaaagtgctgggattacaggcatgagccactgtacccagcctaattggtatttttagaccgtttacatttaatataattactgattgggttggatttaggtctatcatcttattattttcctgtatgtcgtgtcccttctgttttttatccctctgtttcatagcattatttgtatgagtagttaaacagttttttttttttgagatggagtcttgctgtgttgcccaggctggagtgcagcagcatgatcttggctcactgcaacctctgcctcccgagttcaagtgattctcccgcctcaacctcccgagtagctgggattacaggcgcccaccaccatgcctggctaattttgtacttttggtagagatggggtttctccatgttggccagattggtctcgaactcctgacctcaggtgatccacctgccttggcctcccaaagtactgggattacaggcataagccaccgtggctggccaaaacagggcttttgaaggagttaaattaggtaatgtaaatgaggcaggtgcaaatcatattccctaactcagtttcacaagaaatacaactacatttcctttaaattactcattttagtttctctcttgagttctcattctgctagaatggtgtacatttactctcagtcaattgggttctcccattttacttctaaatggggacagcttttgtggggtcaaggtggaagggagcacacatcgggtctttgctgtctttactccaaactggtatctactgggacatctacagactgaatgatcctgggaaggttacttaacccctctgtgcctcagttttctcatctacaaaatgggcataatgataatacttgcttcagtgagtcatgataaggatccaatgagacaatctgtgcaaagtagtatagctcactttttttttgagatgggatcttgctctgttgcccaggctggagtgcagtggcatgatcttggctcactgcagcctccatctcccaggttcaggcaatcctcctgatttagcctcccaagtaactgggactatagtcacgtgccaccactcccagctaagttttgtatttttttttttagtagagttagggtatcatcatgttggccaggctgctctctagctaatgatctcaagtgatctgctccccttgacctcccgaagtgccgggattacaggagtgagccaccgtgccctaacccatagctcacttcttaattcattaattcaaccaacatttcctgagcacctactatgtgctggagactattctacatattggggatccagtgatgaccaagacatatgagttccctcttcttaaactgctctgattttggtgcctagaaatagcaaggactctctaaatgttaaagagtcttctggttttctggggctcagactttgggccatctaggctgcccctgaggcatcccactcttccatcagcaaagccttttgggcctggaggtcttttcctgctgttcttgggcacaagagatctttctgctcctcctatcccattctggggtctaagacactgtgaggccttctaagcctccatctagtctgatgggacaggaagacctttccgctctctgattttctgacacctccctggggctttacccaggaaatagtccccaggtcccttctgctttttagagtctccaaacccatctggggtttttaccatcacctgaaaagctcaccggaaatgagataccagattcttctctctggggcctgccatgtctacacatttattatttccttcccatggtgactttacctccccacatttttttttccatcaaagcagaaattttattacccacattctttgaccacaatgctataacgacagaaatattttcttttacaaaaatttcaatcaccttaagaatgtttaaagtcggccggctgcagtggctcgactgtaatcccagcactttgcgaggccgaggtgggcagatcacctgaggtcaggagtttgagaccagcctggccaacatggtgaaaccctgtttctactaaaaatacaaaaatgagctgggcatggtggcgcgtggctgtaatcccagctactcaggaggctgaggcaggaaaatcgcttgaacctgcgaggcggagggtgcagtgagctgggatcacaccactgcattccagtctgggagacaaagcaagactctgactcaaaaaaaaaattttttttttaaagtcaccagataactttggattaaagaagaaatcaaaactgcaaataaataaaagcaaacatcaattggcattgcctatagtagaacacatgaaatagattatagtaaaaaattcttaaaacacaaagaattccaggatgtggaaagctggggcgagtgttactcacacccaaacagcaacaatagccagaataactacaaaatcataactttttctaaactcattagctaactgagatcacctggcagtcaaaaagtctaaaatgggctgggcatggtggctcacgcctgtaatcccagcactttgacctccccacatttttttttttgagacgggatttcgctttttgttgcccaggctggagtgcactgtcgcgatctcagctcactgcaacctccacctcctggtttcaagcaattctcctctctcagcctcccgagtagctgggaatacaggcatgacaccacgcctggctaatttttgtatttttagtagagatggggttttgccacgttggccaagctggtctcgaactcctgacctcaggtgatccacctgtgttggcctcccaaagtgctgggattacaggcatgagccaccgcgcccggccacctccccacattttaaggaatcttggtttggtggtaagttgggtgagttagatgtgatttgcatatagtaaaatgcacagatctttgatgtatgttcagtgaactttgacaaatgcgtacacctgtgtaactgtcaaactaaccaatatttataatctttccaccaccctagaaagttttttcatatcctttttctagttaatccctccctgccccctacttgcaaccaccagtctaatttctttcaccatcaatttgtttggagaggagttgcttctaactatattttcttccctatcttttatctctgtcataagtcctttcttttcttccaaagacctgggattttgacttttttccgggacagaggcttgctctgctgcccaggctggagtgcagtggtgcattcatagctcactgcagccttgaactcctgggcttaagggatcctcccacctcagcctcctgagtagctgggactatagacacgcaccaccacgtctggctaatttttaaaaatttttgtagatatggggtctcagtatgttgcccagactaatctcgaactcctagtctcaagcgatcctccctccttggctaaagtggtgggattacagatatgaggcagcgtgtcaaaagcctgggcttttgaaataccaaagctaggaaacctacttttcatcttccttccttcttttcctggaacaatgaattcttatgttgtttggatgcagattaaggctaccgagtagcacaaaagtgcaagagaaaccaaaaaaaatcagttactattgctaaaaatgtcacttaaatgttataatgctacctactaagacgtccacagtatgaggctctgcacagtggctcatgcctgtaatcctagatctttgggagacttacagtgacctttgggacatgcagtgagccatgatcacaccactgcactccagtctggttgacagagtgagaccctgtctcaaaaaaaaaaaaaaaaaaattaggctggatgtggtagctcatgcctgtaattccagcactttgggaggctgaggcaggtgaatcaactgaggtcagaagtttgagatcaggctggtcaacatggcgaaagcccgtttctactaaaaaatacaaaaattagccgggcgtggtggcgggtagctataatcccagctactcgggaggttgaggcgggagaatcgcttgaacccaggaggtggaagctgcagtgagctgagatcgcaccacagcactccagcctgggtgacagagcgagactccctctcaaaaaaaaaaaaaaaaaagttaatcctcacaacactaccaggaggtagctactgtgaacccattttacaggtgaggaaactgaggcacggagcagttcgcagattgcatgagaaaaagtagcacgattattcccaccacacatgctacagtgggaggaagacattgatcctgttctgcataccatggggacggggacgggttgtgggaggtgacgttcccaagccctaaatatgtaggacagggcacagggcaggtcctcaccctgagggtcatgtagaggaatggctggctgaatggaatttttatttgcagaattttgtggccaaggcccatggctctccacgggtgtactggctggggctgaatgacagggcccaggaaggggactggaggtggctggatgggtctcctgtgacattaaggcaagtgcttgggtttcctggggtctctctgcttcctctgtgggccctgaccatggggaggggagaaggtgatggagtacatggttgaaggagtcaggagctgtttctttttttttttttgagacagagtcttgctctgtcgcccaggctggagtgcagtggcgcaatctcagctcactgcaagctccgcctcccaggttcaaggtattctctgcctcagcctcccgagtggctgggactacaggtgcccatcaccatgcccggctaattttttgtatttttagtagagacggggtttcaccgtgttagccaggatggtcttgatctcctgacctcgtgatctgcccgccttggcctcccaaagtgctgggattacaggcgtgagccaccgcgcccggccaggagctggtttttactggtacagctctacttgttttattttattttattatttatttatttatttatttatttatttatttatttattctttgagacggagtctcgctgtcgctcaggctggagtgcaatggtgcgatctcagctcactgtaatctctgtctcccaggtagaggttgattcttccaccttagtctcccaagtagctgggattacagacacccgccgtcgtgcctggctaatttttgtaattttgtagagatggggtttcaccatgttggccaggctggtcttgaactcctgacctcaggtgatctgcccaccttggcctcccaaagtgttgggattacaggggtgagccactgcgcccaaccttattttagttttttgagacagtctcgccctgtcacccaggctggagtgcagtggtgcaatctcggctcactgcagcctcaacctcccaggctctggtaatcctcctgcctcagcctcccgagtacctgggaccacagtcacacaccaccatgcctggctaattttttgtatttttagtagagatggggttttagtgtgttgcccaggctggttttgaacttctgagctcaagcgatccacccgccttagcctcccaaagtgctgggatgacaggcttgagccaccacacctggcctctactaattttaaacacagaaaaattcctgtcctgtttggtaaattgccattgccttaaatctcctgagaatccttctgctgccccttggacttccacatcacctaacaactaaaggatttgtcattggcaaagaaggggcctagagaccctgattgcagggtgtgtggcacaggtagcattgctcattattttggtacaccacccccagtcattcccatttccctgtgtgcttggcatccttgcagtccaagctgatagggtgtctagcatcccaggcttggccagacagggacagcaccagggtgattttttggtgacaggctgtctggaccctgaaccttcaatatttcctccattgcaacatctcagtcttttcgtaaaactgctgaaatatatcaagctctccaggctaatggttgggagaaaaaagggagggtggaaggatgaggaagaatttttttttttttttttttttttgagacagagtctcactctgttgcccaggctgaagtgcagtggtgcagtcttgacccaatgcaacctctgcctcccaggctcaagtgattctcccacctcagactattgagtagctgggattacaggtgcgcaccaccatgcctggctaatttttttttttttttttgagacggagtctcactctgtggcccgagctgtagtgcagtggcacaatcttggctcactgcaacttctgcctcctggattcaagcgattctcctgccttagtctcccaagtagctgggattacaggcgcccgccaccatgcttggttaatttttgtagttttagtagagacggggtttcaacatgttggccaggctggtctcgaaatcctgacctcaggtgatctacccgtcttggcctcccaaagtgctgggattacaggtgtgtgccaccgcacctggcggaacattggctgctaaaggctcacaggaatgctttttccgcaaagctattctcagctgaatgggagcctgctcacctaagacactacccaactccactggggtcagctcacaaccggtgacagcctaagagaagcctggaccccttgtgacaagttgggatgactctggtgctgttgacatcccagtggtctctgttggggtcaggctgaggctagagtcatctgagtccatgctcctgctcaattccttccccttctccatctagcttccctcacctctctcctaagaacatcctttaataaatcctacacactcgagtccctgaatcaggccctgctttaagcaagagcccacatgatctaaacaattcctagaaggttgggttgggaggttgtaaaagaaagagtccttggaagacaagacagaaactgaccagattcagaaattgattaaggggccaggcacggtggctcgtgcctgtaatcctagcactttgggaggctgaggcgggcggatcacttgaggtcaggagttcaagaccagcctggccaacatggtgaaaccccgtctctactaaaaatataaaaactagccgggtgtggtggtggacacctgtaatcccagctacttgggaggctgaggcaggagaattgcttgaacccaggagacagaggttgcagtgagccgagatcacgccactgcactccagcctcagcgacagagtgagactctgtctccaaaacaaaacaaaacaaaacaaaaaaccccccaaaaccagaaattgattaagggccaggcacggtggctcactgtgcccggcttacaggtgtaaggctccacacacggcctaatatgggttttgccaaatgcgtagtgccaggtattcatcattacagtattatacagaagagtttcaccaccctaaagatccctgtccctctgcccactttttcctccatccagcttctgggagccagaggaacccaataacatccacgatgaggactgtgctaccatgaacaaaggtggcacctggaatgatctctcttgctacaaaactacgtattggatttgtgagcggaaatgttcctgttgaagcccagggccgaggctgggggtccatatctgagtgtctctttgagatgagaatctcctgccctttcgtggacggccttgcctcttcgtgagtggacacacagatgtgcctcaaacaggattggcaccctggatgcagcaagttcccaggggtgcaagtcaggctgtttctagagtgaggacttgggcttgccctagtagatggtgagctgggaggatgctcagagcttggtggtgggaggtctcccacttctggggttgaaaggatcttcactaagttcctgatcatgactcttgggaagtgatactagccctgaggaccctggggctggtgttgaacctgggatgaaatatcctggcgcctgtgaaccacaaagagctgggactgggctccttttcctgcagcctcaaacttctgggctcaggtgatcctcccatctcagcctcctgagtagctgggactacacatgcgcaccaccatgcctggccaattttttgtagcatttaaagagagggagtctcactatgttgcccaggccagtctcaaactccttgcctcaatggatcctcctacttgggcttcccaaattgtgaggattacaggtgtgagccactgtgcctggctcaaaattattattattatttttatagagatgaggtctcactctgttgccgaggctggtctcaaactcctggggtcaagcaatccttccgtgatggcctcccaaagtgctgggattacaggcatgtgtcaccgtacctggccgatatttttatttttatttttactttccccatcttttccttttttttttttttccaaacaaaagctttgaaagtggtgacagaaaaatttccctttgagctagacctctagatctgcctcgcacagaaatacattaagtgggctggtctcatgtagtccccacatcattgcaaattacaaacctaaaaatacagaacatcagcggagaagacaggagagcttctatattcaccccatgtcgtcctctccagacactgcttccttcctggtctcaaacagcacaaataacccagaaaccatcaaaattatttttgaccagcaactttctcaatgtcttgggtgaggtttgcacaagctaagtggcagaatcagacttttgccagaagacttggcccgtggaacttctatccttttttttttttttttttttttttgagatagggtttcattctactacccaggctggagtgcagtggcacaatcatagcttactgcaccctctgcctcctgggctcgagtgatcctcctgcctcagcctcccaagtagctgggactacaggcgttcaccctcacacctggctggcccatggaacttctagaaaggcataccagctgaaaagcaagacccctacatagtgtggccaggcaggccataacctggtcatatccacacaggacaacgatggacctatctgccagcacgtgcccttgagctatctgtgggttgtaacgtctttgatgatataattcactttacttgccaggcacagtggctcacgcctgtaatcccagcactctgggagactgaggtgggctgatcacctggggtcaggatttcgagaccagcctggccaacatggtaaaatcctatctctactaaaaatacaaaaaaattagctgggcgtggtggcatgtgcctgtaatcccagctactcaggagactaaggcacgagaattgcttgaacccaggaggcggaggttgcagtgagccgagattgtgccactgcactccagcctgggtgacagagcaagactccatctcaaataaataaataaaaataaaaattcactttacttctgtgtggactttcctgggctattagctcttgcaatgttagtgcttctcaaaatgccactatgttgggtgttccttgtctactgtgtgttagtttgctggggctgccataacaaaggactgggtggcttcagcaacagaatgcattttctcacagttccggaggctggatgtccaagatcaaggtgttggcagggttaatttcttctgaggcctcctgtcttggcttgtagatgatcctcttctccctgtgtcttcacctggttctccttctgtgtgtctgggtcctaatctcctcctcctcttcttttgtttttgagacagggtctcgctctgtcactcaggctggagtgcagtggtgtgatctcagctcactgcaacttccacctcccaggcttaagcatcctcccgcctcagcctcctgagtagctgggattacaggtgtgcaccaccgtgcctggttaattcttgtattttttgtagcaacggggtttcaccatgttgcccagactggttttgaactcctaggctcaagcaatctgcccaccttggtcccccaaagtgctgggattacaggcatgagccactgtgctgggcctacaacgaccactttaaagatcctgtctccaaatacagccatattaggaggtcctgggaattagaatttaaacatatgcatttgggaggggtggcacaatttggcccataacattcacaaactgccagagtgacccccacccgaccctcctgccctggccatgtgacaaccaaaaaataccaattagagggctggtactactcccagctaggcataactcaacatagtattccctttggacaatccctgaattgcatccaagggtgggtagacattctccaaaccaatcaatttattttttttttttttgtgacagagtcttgctctgttgcccaggctggagtgcagcggcgtgatctcggctcactgcaacctctgctttccaggtttaactggttcttctgcctcagcctcctgaatagctgggatttcaggcacgtgccaccatgcctggctaatttttgtatttttagtagagacagggctttgccatgttggccaggctggtctcgaactcctgacctcaagtgatccgcccacctcagccccctaaagtgctaagattacaggcgtgagccaccatgcctggccttattttattttttgagacaaggtctcactctgtcgcccaggctggagtgcagtgttgtaatcatagctcactgaagcctcaaacacctgagctcaagaaatcctccgtcctcagactcctgtataactagaactacaggtgtgcccccaccacacccagctaattttaatttttttttttttttgtatagacaggggtcttgctttgttgcccagactgggcttaaactcctggtctcaaacaatcctcctgcttcagcctcctaaaatacaaggattgcgatcaatttattgatcaataagctcccttaatcaatagcagaatctttcctgttttgtctgagaacaggtgcttatagcaaggagactgtgaggagagcaggtggtgggagaggtcggagctgatttcacttcctgtttctttgatttgttttaaatctacttgttcttttatttcgttattaaaaaaattttttttgagatggagtgtcactctgtcacccaggctggagtacagtggcatgatctcggctcactgcaacctcctcctcctgggtacaagcgattcttgtgcctcagcctcctgagtagctgggattacaggtgtgcgccaccacatccggctaatttttgtattattagtagagacggcatttcgccactttggccaggctggtctcgaactcctgacctcaagtgatccacccgccttggcctctcaaagtgctgggattacaggtgtgagccactgcacccagcctcgttatttatttttaagagatgggttctcaggacgtggcccaggctggagtgcagtggcatttcacaggcacgaccccactactgagttttggttctgtctgtcctctcttctcacctctgcccacctctgcagctgccctgatgcatcactaccaaagccagctcctgtactgtccgcagcctgctgagtgggtgggtgtcgtgttgtaaaccctccacccaggggactgttatgtcaagcaactttatctggggtcaggggaagttcccacatttcagaagagggaagttgttttctgatatgcgtattgagaaatggggaagcaggggtctgtggtcacgtctctaggaggcccctggtggaactggtcccaacctatctcccttccacatctctcatgattatctaattgcagagaggtaaatatgaaagaggtcactttttaccactttaggtccaggggagcaacagttggataaaaataataaccatggtttatcaaacatatattgtgtggtaaataaatgcagtggctctcattgaatcttcaccatgactttgtgaggttggaatatttaccaacgcccgccaatctttttttttttttgggcagagtctcactctgtctcccaggctggagtgcagtggtgtgatctcggctcactgcaacctttgcctcctgggttcaagccattcttctgcctctgcctcccaagtagttgggattacaggtacaccgtaatgcccagtgaattttttcgtatttttactagagatggggttttgccatgttggccaggctggtctcaaacccctggcttcaagtgatctgcctgccttagcctcccaacgtgctgcgtgctgggattataggtgtgagccactgtgcccggcccccatttttttttttttttaaagacagggtctcactctgtcacccaggctgaagtgcagtggtgcaatcacagctcattgtggcctcaacctcctgggctcaagtgatcctcccacctcagcctcccaagtagctgtggctataggtgtgtgccactacacctggctaaccaaccccattttatacctgggcaaactgaggcccagaggtggggtctcacggcttgtccattgtcatttagtgggtaaatggcagaactgggattcagattccatctgtgcctcccactgtttgttgatctctttctacagctgccttctttttttttttttttttttttttgagatggagtctcactctgttgcccaggctggagtgcagtggtgtgatcttggctcactgcaacttccatctcccaccccagctccctcgttcctcgggagaggtgactctgagatgcatgttccacattatctcctgaaagtccccactagggtaaagctccacctgcctagagagatagcctgctcaactaacacatttttggttaatttttaaaattaaaaaaaattttttttagagagacagcatctctggccaggtgtggtggctcacgcctgtaatcccagcactttgggaggccgaggcaggtggatcgcttgaggccatgagttcgagaccagcctgggcaacatgttgaaaccccatctctactaaaaaatacaaaaattagccgggcgtggtggtgcgtgcctgtaatcccagctactcaggaggctgaggcaggagatttgcttgaacccgggaggcgaaagttacagtgagctgagattatgccactgcactccagcctgggcaacagagagactctgctaaaaaaaaaaaaaaattagagagacaggttctcgctgtgttgcccaacctagagtgcagtggtgcaatcatagctcactgcaacattgaactcctgggttcaagcaatcctcccgccttcgcctccagagtatctgagactacaggtgtgtgccactgctcccagcaataacacatcttttaacacatcttgttctttctctgccttacttttttttttttttttaacagagtcttgctctgtcgcccactgtaacctccgcctcccaggttcaagtgattcttctgcctcagcctcccgagtagctgggactacaggcctatgccaccacacccggctaatttttgtatttttagtagagacggggtgtcaccatattggccaggctggtcttgaactcctgacctctgcccttgtgatctcctcgtgatctccacgtgaactcctcgtgatctgcccatctcggccttccaaagtgctaggattacaggtgtgagccaccgtgcccagccctgcctcatttcttcacaccccgttggtgtttcctgggatcatctccaaaataatctacctgcatgcattaaactccttatctcagagtttgcttttgggagaactcaaatgatgatgctatgggatgagtgtcatcatcaaagatgagtttgtgaaatggttctggtttgcctgggactgagggactcctggattgtgggacttttggtactaaacctgggaaagtcccgggtaaaccagaatgaattgactatccttataggaggatagtgtggcatcagggaagccaagagaagagaatgcttcaagaagaaaaaaaatgatcaacagagtcaaatgttgacccagcggtcaagtttggtaagactgagaaacaaccagtggactttgcaccgaggaagcatttgggacattggttcatcctttggtgtgttgcaagcagaagttagattgcagtggttgaacagtgaggaggttggagcaagtgaagacaacacagtggaaacaagcttttttctagaatttttttttttttttttttgagatggaatttcgctcttgttgcccagtctggagtgcagtggcgcaatctcggctcaccgcaacctccatctcccgggttcaagtgattctcctgcctcagcctcctgagtagctggggattacagacatgcgccaccacgcctggctaatttcgtatttttagtagagagggtgtttctccatgttggtcaggctggtctcgaactcctgacctcaggtgaaccacccgccttggcctcccaaagtgctgggattataggtgtgagccaccacaccccacctttttttctagaattttggctgtgaagaggaggagagatagagtggctattgcagagggaaagcagattaaggggagactttttggatagaaggggcctgaacatgtgtcctctcttttccttccttcttttcttttctcttttcttttcttttttctttcttccttccttcctttctttttcgttctttctctttctctctctcttcctctctctcttccccttgcttccctccctccctccctccctttctttctttctttctttctttctttctttcttcctttctttctttctttctttcttttctttctctctttcttgatggagtcttactctgtcacccaaactagagtgcaatggcatgatattgactcactgcaacctctgcctcctgggttcaagtgattctcctgcctcagcctcccaagtagctgggattacaggcccctgccaccacgcctggctaatatttgcatttttagtagagatggggtttcaccacattggataggctggtctcgaactcctgacctcaggtgatccacctgcctcggcctcccaaaatgctaggattacaggcgtgagccactgcacccggccatgtcctctcttttcttccaaaattcctattattctcatattaaacaccccagtcttccttttattcttccaagattttaatcttttggccttttttcctcagtgctttgagctatttctcctgtgtggtcttctaagcctcaaatttggcttttgagagtgatgacttaaaaaaaaaatcacccagcatcaatagcagacaggtgctaaagaaaaataaaaatcatccagtaaaatatcttcttaaatgtattccttttttattaagttccatagaactagaacttttgggcatgcacttgaatcttcttacattctttaatttttttattttttgcaaaataaacttttatttggagggacagcataatttagagtccaggctcttttacactttaaacatttatttatttatttgttttatatagacaaaaatatatatatttatcatgtacaacaggatgttttgaaatatatctacatcgtggaatgactaagtcaagctaattaatatacgattacctcatataacttttttttcttttttttgtggtgagaacacttaaaatctctcatcaggcgcgatggcttgtgtctgtaatcccagcactttgggaggccccggcaggtggatcgctgcttgaggtcaggagtttgagatcagcctggccaacatggtgaaaccttgtctccactaaaaatacaaaattagctgggcatggtggcatgtgcttgtagtcccagctatcgggaggctaaggcaggagaattgcttgaacccaggaggtagaggttgcagtgagcctagatctcaccactgcactccagcctgggtgacagagtgagactcagtctcagaagaaaataagttagcctgggccgggcacggtggctcatgcctgtaatcccagcactctgggaggccaagtcaggtggatcacctgaggctgggagttcgagaccagcctgaccaacatggagaaaccctgtctctactaaaaatacaaaattagccggacatggtggtccatacctgtaacgccagctacttgggaggctgaggcagaagaatcgcttgaacccgggaggcagaggttgcactcacgccgttgcactccagcctgggcaacaagagcgaaactccatctcaaaaaaaaaaaaaaaaaaaaaaaaattagcctgtatctagcaaggaagtaaagccagtaggaagctgatggtttgagggaatgagtgagtttaaagagcaagtttatggccaggtgcagtggctcatgcctgtaatcccagcactttgggaagctgaggctggagaaccagttgagctctggagtttgaggctgcagtgagctacgatcatgccactacactccagcctgggtgacagagtgaaactctgtcttaaaaaaagagcaagtttaggatgagtgggactaagaacttgaggaaaaggacctcttcatttacaaaaagtcaaggaaatatttgcagtggtcatgctttgggtttccagggacaagcattgactgaatacaccatagtgaagagaaatgcaatttaccacacatttgttgagagcctattgtggagaacaaacagcttgggaagtaaaggttgattacttcctctccaaggatgatatgtttaatgaattcccttttccttagcttcattcttcataatgccaaagagatccatggatatgattttccatatggagttgaatattctagttttaatattttctcttcacttgtcctggaaaaacatccccctataaaagaggtttagattaaaggtggatgtaagggtaaaataaagtaaacagacaaaatcaacaacatggaaaaacagcaggagtgatttaaacccagtttgaaccagcaggcaaggatggcatgatctcctagcatttaaaaatcctagggcagatgtggtcttctttggcttagagtgggaagacttatcaaaaattcagcaggaagaattcttctttttgataaattttcagacatattacactctggaatttcagccccctggatgtttttttgtctatgaagaaaggttagagtcttgttggctttgtttctctttgaatgcctgttatctaacatagtgcctgacacactgtagtactcaacaaatgttctctttgcaccccacaacttacagcttggtttagcagccccaagctccacagaggaaccaacatctcctgaagaagcctatgaggttagtgcttcctagcctagttataagagttgtgggcaagaagttcaaagttacatcttccttcctggtatttatggttcattcatagaatttcccatctagatgcaatttacaagtcaagcttgactttttccataggcaacattgcctggcgacctatctgatcttccaactttatcacgtttcttgggaacagagttagaaagttaacccaaggtcaaacttgtccatagagaaagagtttcattagctttttactcaaactctgtgcctaaaaaataaaagcatggagatttttctgtagagatggggtcttattttgttgcccaggcaggtctcaaactcctgacctcaagcgatcctcctaccttgttctcccaaagtgctgggattactggcatgagccaccatgcccggccaaagctaatgtatttcttaaagagagattcatatatacatgtatatatgaatatatatgtatattcatgtatatatgaatatatatgtatattcatgtatatatgaatatatgaatatattatgagtacatatgaatatatatgaatatatgaatatattatgactatatatgaatatatatattttatatatatattatatatatatatatatatatttttttttttttttttttttttttttttgagacagggttttgctctgtcacccaggctggagtgcagtggcctgatcttggcttgatcttggctcattgcaacctctgcctcccgggcttaagcaatgctcctgcctcagcctcccaaatagctgaaactacaggctacaggcatgcaccactacacctggttaattctttgatgtttctgcagagacagggtctcactatactgcccaggttatatttgatattttccccttccaaagatacactcatattattcaatttccacaatgttaaacgattttccttatttcattgtggagaaccaataactggaatgctggcagctttgggaattattttggattatctgggaaacctttcataggtcacagtcaacagttggcacttttactcttgttgagaataattaagcctaatattaatcaaattttttttttgagacagagtttcattcttgtcgcccaggctggagtgcaatggcatgatctcggctcaccgtaatctttgcctcccaggttcaagcgattctcttgcctcagtctcctgagtagctgggattacaggcacctgccaccatgcccagtggctcacacctgtaatctcagcactttgagaagctgaggcgggcggatcacttgagatcaggagttcgagaccagcctggccaacatggtgaaacaccatctctactaaaaatacaaaaaaattagccgggtgtggtggcgggcgcatgtaatcccagctactggggaggctgaggcaggagaatcgcttgaacccaggaggcagaggttgcagtgagccgagattgcaccactgtattctagcctgggtgatagagtgagactctgtctcagaaaaaaaaaaaagtgaaaagaaaagaagagacaggttctcactatgttgcccaggctggtctaaaactcctggacttgagtaaaaccatggcaatattgccctaaagctacctaactgtgactatggaaattgctactttgcattcagtgttgtgggatttgcacgggcagtactcattttccctcatacttcggattgaccacagttgttacggcactcttataaataggattttcacccgtgtcccatttggcattcattttctccttttcaaatttagcaaactcccttctgtcatgaattatcattaaaagcttccatatcagcagtaatgcaaggccaataagaacaattccagcaaccacaccagctacaattggaatgatgtctggaccagtgggacactctggattctccacaacatgaaccatgacctcgttgttcccattcactgaatacgtaaaatagaaccaacagtcgtcaacatccttctccttacaatgggacacaggatcaggttggaccggctggggtaatttgtcccgactttctaccttggtaatgttaaaataggaacattcctgtgtgcatgtgtctttcttttctcctttattgaaggctctgcactgaacacattctttatgctcagcacagacaccaaggcaggtctgacacatctcacacgtttgcccttgaaacttcggatctgtacacttacagacaccacactcgcagatgccccggccattgcagatctgtccgttgctggcttcacaagtactagtataatttttaaaatgttttattattttgaaaataatgttgtaattcatgccagggactgacaaaagacttgagacaggatggttattcttgtcagctaaggtcacattgtgcctttttgaccttttcttcctggactattgaaatcaagcttattggattaagtgatatttctatagcgattgaaagggcaatagttaaagtaatgagcatgatgagagtttctgttaatcatgtattaaaactgatttttagctttacaaatatgtcagtttgcagttatgcagaatccaaagtaaatgtcctgctagctagttaaggattgttttaaatctgttattttgctatttgcctgttagacatgactgatgacatatctgaaagacaagtatgttgagagttgctggtgtaaaatacgtttgaaatagttgatctacaaaggccatgggaaaaattcagagagttaggaaggaaaaaccaatagctttaaaacctgtgtgccattttaagagttacttaatgtttggtaacttttatgccttcactttacaaattcaagccttagataaaagaaccgagcaattttttgctaaaaagtccttgatttagcactatttacatacaggccatactttacaaagtatttgctgaatggggaccttttgagttgaatttattttattatttttattttgtttaatgtctggtgctttctgtcacctcttctaatcttttaatgtatttgtttgcaattttggggtaagactttttttatgagtactttttctttgaagttttagcggtcaatttgcctttttaatgaacatgtgaagttatactgtggctatgcaacagctctcacctacgcgagtcttactttgagttagtgccataacagaccactgtatgtttacttctcaccatttgagttgcccatcttgtttcacactagtcacattcttgttttaagtgcctttagttttaacagttcactttttacagtgctatttactgaagttatttattaaatatgcctaaaatacttaaaaaaaaaaaaataaaaaaaaaaaaaaataaaactcctggacttaagtgatccttccaccttggcctcccaaagtgttgggattacaggtgtgagccaccatgcccagcctctttttagatgtctattctgtcatttattcaaaaagccaaatatggaacgaaatgtcacatagtgcagaaagctcattctgtgttgcactgagcctgagttagtgcaatggaagaacagaataccagcaaccagattccagaagtatcatctttctaacagggctatgtcctcccccagaaaggtcccatgattccctgcacccatcctctgcaattatgcagagcagctggggcagaatccctcccctggagcctgttccatggcgtaccgtcactctgtgggcccacatccacatctttatggacagtgggcatttgggggaagatgatcactctgctatgcctacacttgtaaatttcccccagtgagagtctgtgttagattgcattggttctgatgatatgtttcacccatacatcttcacacagcaagaatacatatgaaaaccagcttaagtgctgttagtgagcagagaggagtcactgaggaacaatataacaagaatgaggaactcaaaccaggttatcgggaaaaggactcttcctcataccctccaggaaagcaagtttgtactaagactagctcctcaaagctaccctacgtttcccaggctggtgtcaaactcctgggctcaagcgatcctcccatcttagcctcccgagtagctaggactacaacgccaccacacctggcttcctttttttttttttttgagacagggtttcgctcttgttgcccaggctggagtgcaatggcacgagctcggctcactgcaacctctgctgcccggattcaagcgattcttctgcttcagcctcccgagtagctgggattacaggcatgtgccaccatgcccagctaattttgtatttttagtagagatggggtttctccatgttggtcaggctggtctcgaactcccaacctcaggtgatctgcccacctcggcctcccaaagtgttgggattataggcgtgagccactgtgccaggcctgtggcttcctttttattattattattttacattgtggaaattgaataacatgagcatatctttgaaaaaggaaaatataggccgggtgtggtggctcatacctgtaatttcagcactttgggaggctgaggtggtaggactgctcgagctgggagatcaagaccagcctgggcaacatagggagactccatctctctctctataaaaaaaattagtagggcatggtggtgcacacttgtggtctcagctactcaggaagctgagatgggaggattgcttgagcccaggaggtcgaaaccgcagtaagctatgatcacgccactgcactccagcctgggtgacagagcaagaccctgtctcttaaaaaaaaaaaaaaaggaaaatataaattaaaaactagaggaagctcagcaaacgaactcaggagcagaacaccaaacaccgcatgttctcacttgtaagtgggagctgaacaatgagagctcatggacacagggaggggaacaacactcactggggcctgttaggggacgttggaggggggagagcattagggaaaagagccgatgtgtgctgtttttgtttgtttgtttgtttgttttttagacagagtctcgctctgtcacccaggctggagtgcaatggtgcgatcttggctcactgcaacctccgcctctcaggttcaagtgattttcctgtctcagcctccccagtagctgggactacaggtgcataccaccacacccggctaatttttgtatttttagtagagatggggtttcaccatgttggtcaggctggtcttgaactcctgacctcaggtgatgcacccaccttggcctcccaaaatgctgggattacaggcatgagccaccatgcccagctaatgctgggcttaatacctaggtaatgggttgataggtgcagcaaaccaccatggcacacgtttacctatgtaacaaacctgcacatgtaacctcagaacttaaaaaacaaaaacaaaaacaaacaaacaaaaaaatcccaaactagaggaagtttgcagtgtcaagagaggagtatgtaaaacattagaacaattcagatgtttcacttacctcactgggttttgagtcaggacccatcttgctggaaagtgtgtatgtctcagactcagattttgattttacgatctctctaaaccacttttgatattgtttctggacctggaacatcaaaggaaatacctggatgggttttgctaacattggtgaacagcagaaaggtcggtgagtcaggaagaggatagagatgtattattatttatttattttcacaaaacatggtctattcgtacaatggaatattactcagtcttataaaggaaggagattctgacacatatgctaccacacggatgaaccttgaggacatcaggctaagcgaaataagctggtcatgaaaaggcacatactgtatgattctacttatatgaggtacctaaagtagtcaaatccatatagacctaaagtagaagagcggtttccagggcctggggggaaggagagtggcgaggtagtgtttaatgtggatggagtttcagtttgggaagatgaataaagttccggagatggatgttggtgatggttgcaccacattgcgaatgtgatgctactaatggtacacttaaaaatggttaaaaaggtaaattttatattatatatgttttaccacagtaaacattttcattacagggtatataattgttgtagaaaatttatggccaggtgtggtggctcacacctgtaatcccaccactttgagaggccgaggcgggtggatcacgaggtcaggagattgagaccattctggctaacacggtgaaaccctgtctctactaaaaatacaaaataattagatgggagtggtggctcatgactgtaatcccagctactccagaggctgaggtaggagaattgcttgaacctgggaggcagaggttgcagtgagctgagatcacggcactgcactccagcctgggagacagagcaacacttcatctcaaaaaaacaaaagaaaagaaaagaaaaaatagaaaatgtataagatatgcatatgcaaaaggaagaaaatagaagttgcatataattcctcaatctagtgaaaatcaccaataatattttggtagtacccttcaatgtgtcttggttttgggcacctcagaagcagaccctgcaacaagggtggaagtgtaaggagtttatttgaggggtgatcccaagaagcaccagtagggcaatgaggaagcaggacagggaagagaaggcagctggtaaagaatgcataattaaggttatttccactgtgggaatctggggctcagccccattcaggagctctggggtagagcatggaactaccttagagtcaacttgcctgaaggaggagggagctggggtatttatccaccagctcccatcagtcatgggttgatggccggtctcaagggccattactctttggcatcaccagtttgccctatgcatgggccaggcgtgtcctgtgggcagtacgaagccttcaggcacagtcatgggtgtttgcaacaagcaactccaggcatgtagagacagaagccaaagggatatgagagggccgtggacagcatctgccacaccgtgatatcctaaccttggcactgttgacatcttgggttggatcatgttttgctggagagggctgtcctgtgtgcattgtttaggatatttagcggtatccctgacctccaccaactagatgccagtagaaacccccaccccagtaatgacaagcatttccccagacattgctaactgtcccgtggtgggaacacaattgctcctggtaagaaccattctgatatgccataaacacccatacctacatataaataaatacataacaataacacaaacaatgagtgcttatactcgttatataaacaaaatgaaaccctctggggtagtttcttttgtttttttttgagacggagtctcgctctgttgctcaggctggaatgcaatggtgtgatctcagctcactgcaacctctgcctgccaggttaaagtgattctctagcctcagcctccctagtagctgggattacaggcaggtgccaccactctcggctaatgtttgtattgtttagtagagacgggctttcaccatgttggccaggctggtcttgaactcctgacctcagatgatctgcctgcctcggcctcccaaagtgctgggattacaggcacgagccaccacgcttggctgggttccattgtggagacagcgtgcagtccagattatccctgagcaccccttagtaagggatcttcttggaggacacagactactgttcagttgcagacaaataaagtgttttgaatttagtagccatatgaaataaaactatatatatctttaaaaactggatgctaggccaggcacgatggctcacgcctgtaatcccagcactttgggaggctgaggcaggcagatcacctgaggtcgggagttcgagaccagcctgaccaacatggagaaaccctgtctctattaaaaacacaaaattagctgggtgtggaggtgtgcacctgtaatcccagctactcaggaggctgaggcaggataatcacttgaacccgggaggcagatgtcgtggtgggctgaggtcgtgccattgcactccagcctgggcaacaagagccaaactctgtctcaaacaaaaaacaaaaaacaaaacaacaaaaaaacgaataacaaaaactggatgctatgatatgcctcacaaactgagataaactaagggaagagtacatataagtgttttgcgtatgctcatgtgaaaccccatctctactaaaaatacaaaaaaaaaaaaaaattagccaggcatggtggcatgcgcctgtagtcccaggtactcgggaggtggaggccgaagaatcgcttgaacctgggaggcagttgcagtgagccgagattgagctactgtactccagcctgggtgacagagcaagaatctgtctcaaaaaataaataaataaataaataaataatgatgatgatgacgatgaaacacacactctgctagtggtgcctgtgaaccaagtggagatgagttctgcctcctgcctcagcctcctgaagtactggaattatgggcatgagtcactgtgcctggccccagtttctctttaacgaggcagttaacctgcagtacagtgaagttcaagacctcatcatgcccactgctgttccatggtttgagatgtgagttgcaaaaactgcaatagcagactgggatggatctatgagtttgcccctgcagacagccagtgttacaaggaaggctgtgtgatcctggaatgtgacctagtttgggacagtgacagctttaaggggcagatatcatctgatatgtcttgaagaaaaagagataaatcagtccagcatggtggcttacacctgtaatcccggcactatataattggtattgactggaagcttcttctttttctcttttttttttgagacggagtcttgctctgttgcccaggctggagtgcagtggtgcgatctcggctcactgcagcctctgcctcctgggttcaagtgattatcctgcctagcctcccgagcagctgggattacaggcgcctccatcatacccgggtaattgttttgtagtttttagtagagatggggtttcgccatgttcgtcaggctggtctcaaactcctgagcacaagtgatccccctgtgctggcctcccaaagtgctgggattacaggcgtgagccactgcaccctgccgattggaaactttttctgaaatagggcagaactgcttgggtgtttttttccatgtaacttaaggtagtaatgtaaataaaatagtagttggaaaaaaaataattcatgtgaagtggtgtgttagctgcattgttgatctccacgattcactcctttgtagttgtattacactctgtcttagtctcttggtgggttgagtgttcttttctcattgactttgggcttgggtgtgtgactttctttggctaatgggatattagtagaggaagaatcacaggcttgagtgaccttgcccagtagggtctgcctctttgtgatttcagcattgttaggagaagaatatttgctggggagttgctcccccttctgcttaagcctcaggatgagtcacaaggagcaggcctaaatctgatctgcatcctggagcaaaggcaagctgagctcagctaagatcaggtgaaccccaatagacctgtagaccccagaataagaaaagcaaatatttgtgtttaaaccaatgagattttttgaggttgtttgttacacagcattagctgactattacgagtgggaaaactgagaaaaaggcatgatttttttttgacatagcaattatttatattctgaaatgtgttaataaatgatgtatcttaacaactagtagcatttttaaagtagagaaaatagagagagtgtttacaggtggattataatctcatgtggaacatttagagaatgtcaacttaaatccccattgaactccatttccaaaattttcttaagtttaaataacaaagaaaggggtcagtgtttacctgctggctgaggaggcagtagaccaagaagatgaagaagccttggaggctgttgatgatggtgaagaggtaggccatgacctgggcagctggacccacctgtagcaagcccagacaccatgtgcagcccaggatgaagagctgagctgttgctttgaaagccagcatcctgggaggaggaagtcagagattaggatgtcaaaaaactaataatgagcatgaacacccctctagttagctgttaatagtaagaactctggagctagactacctgagtttaaatggaagccagcactggctacctgtgtgatcttgtgaaagctgctttaccttcttgcaactcagctccctcatcttattttattttattttattttattttatttttgagatggagtcttgctctgttgcccaggctggagcacaatgacatgatctcgactcactgcaacctccacctccagggttcaagtgattctcctgcctcagcctccccagtagctgggactaactacaggcatgcaccatcatgccctgctaatttttgttatttttagtggagatggggtttcgccatgttgaccaggctggtcttgaactcctgacctcaagagatccacccatcttggcctcccaaagtattgggattaaaggcgtgaaccactgcacccagcctcagttcccttatcttaataattgtcctatttcgtggggttgctataaagattacatgagactttaatgggaaagtatttaggacaatgtatgggacaaagttagtaccagacatgcataaggcatttgaaaacctgggtgctttctctctcactcttatcatttatagacaggggtcatataattttttttgttgagacggagtctcgctctgtggcccaggctggagtgcagtggtgtgatctcagctcatgggttcaagcgattctccagcctcagcctcccgagtagctgggattacaggcacgtcaccacacccagctaatctttgtatttttagtagagaaggggtttcaccatgttggccaggctggtctcgaacgactgacctcaaataatccacctgcctcggcctcccaaagtgttgggattacaggtgtgagccaccccacccggccggggtcatataatttgttattcaaacaggaaggcttttgtgatcaaaaggaggtgtactgttcctaacagaaagaaatgataaatgtttgaggtgatgagtaccttaaataccctgatttgatcattgcacattttatgcatgaatcaaaatatcacaaatactttgtaaatgtatataaatattatatatcaataagaataaaaataataataaaaaatgaaagggatactattaataattacattgtgtcgacagacataaactgagactgttccaggtaagctgagatatgaggccatcctatttatagtatttatggcatatatacacacacaatatatatatgtacatatatattttatatacactatcacaacatataatcacaatatatagtgatagtgtatataaaaatatacattgtgttatatatgtatagaatatattatatgtgtatgtatatgtgtgtacatacacatataatatctatattacatgcatatatacattatatatatccctaattattaaggatattacatcagtgaggaaagctaattgaggaacagtttgtatagtgtgatcctattgtgtgtgtgtcggtctgttctacttaaaagtgcacagagaaagctctgggaaaatgtcatattttatctcacacatcatacaggctgttaattctggcttcctgggaagtggaagtagcaggaagagggacagccattttcattttttactgtatatatttcaaaagactataaaaaaatgtaacaaagttgtcttatttttatgattaaaatgaaaacaacaaattacatgctcaaattaaaatggatgctgcaacataaaaatactcatacctcaagatattttgaaatattatacaagatatcttttaatctagattcttattgaacctatcacacacgattggagataaacatttaaattggtatatgtacagagagtttaatttgtaatttaagcatgtgatttaatatagctagattgatctctattggctggggtggacatagctttgtgacattaccagattcatttttagggtttctatataatttaagcttcttagtaactgttggattagcaaatttgagttggttgcttttgataaaaaatatactcctgtgtgtatcttgtgtagtgtggcagaaacgaatgtttttctcccttttcatcttccttttagtgttagatctcttcccctttgagttttaaaacaaggcacatggtcaaggtagagactacatttcccagcctcccttgcagctgggtgttatcatgtgacaaagatcagccaatgggatatgagcaaatgtggcaactgcaactcctatattacctccttcccatggatgggatattgacaagggcaacatccttctagaggatggtggagcaacaaagtagaaagcacctgagaccctggaacactgtgtggagcagagcttctttattagccctgaactggtcacttctgggttgcaacatgagactgaaataaacttctattttattcttttttttttttgagattttttctttatcacagcagcttagcttgtattctagctaactcaggttctcattaactgtgatggtggaagattacagtggtcttgctagtcctgggagcatggctgttgaatgtacgtgtgtatggatatgtaggaaggactggcagaaggaaagggaataggaagtaccatttgtcacatcctaccttgtgttctggatggttgacacttcactattgagggaggaaagttttcttttcaaaatccaaaagaccaagataaacaatactaaattcgcctgcaggaccaacacaaacaaggcagagtgcaagttaaagtaatgtatggtgtccactttaaattgcacacaggagtcctaccctcttgtacatgggactgaattggtagcaggtggaaaatcaaaccacccaacagtggaaatgcaagccccttgtaccatcttgtacccagcacttctcttggttcttcctagtttgggaacatcgaaggcacatactcacagagaaaatggcacagactgggccaaggaaactccacatgaatccctggtccaggtggagccagcatctaggaacagtgggaaaagagatacaaagagagatcagagaaagtgcgtgagatcaacataaagtgtctcttttcctaccagagaattgtttccagtttctcttgaaagtcagctgatgacaggccaggcacggtggctcacgcctgtaatcccagcactttgggaggccgagatgggcggctcacgaagtcaggagcttgagaccatcctggctaacgtggtgaaaccccatctctactaaaaatataaaaattagctgggcgtggtggcgggcacctgtagttccagctattcgggaggctgaggcaggagaatggcgtgaactcggtaagcggagcttgcagtgagccaagatcgcgccaccgcactccagcctgggcgacagactgagactccgtctcaaaaaaaataaaataaaataaaataaaataaaataaaataaaataaaaagaaagtcagctgatgacaatagcttttttttttttttttttgagacagggtcttgctctgttgcccaggttggagtgcagtggtgcgatctcagctcactgcaacctctgcctcctggattcaagtgattctcctgcctcagtctcctgaatagctgggattacagatgtgcaccaccacacccggctaatttttgcatttttagtagagatggggttttgccatgttggccaggctggttttgaactccagacctcaagtgatttgctccccttggcctcccaaagtgctgggattacaggcgtgagccaccacgcccggccaacaatcagctttgattacacattttgattgcaactttgatccacacatcatgtgacagccactttcactttatatatttcaatatatatatgaaattttatgaaaattttatgaaaattttaacaaacttgtcttatttttatgattaaaatgaaaacaacaaattacgtgctcaaattaaaatggatgctgcaacataaaaaatactcatagctcaaggtattttgaagtagtagtatacaaaatatattttcatttagagccttattgaacctattacacacaattggagatacatatttaaattggtatgtgtacagagagtttaatttgtaatttaagtatgtgatttaatatagttagattgatctctgttggctggggtggacacagctttgtgacattaccagatttttggggtttttatagaatttaagctttttagtaactgtggtgtgatttaggataataggcaccaaacagctaggaggaacagcgtcctgttaagcattttaggagcacagtcctgttgaattttcacaccagcactgtgaggttggaacaatggggacaactattattctcatctcgctaatgaggggactgagactggagagctcaaattacaggaagaataaagttgggacctaactcttgtgatccgagagattgaaatagacacttctatatccactaacatggatcctaaggttaaggaaaccaagttacccatgggtcgggggttcagggcctggctggtgaagcaactgtctaaattcctcggctacaagaaaacccacgcttgctaaactccataacaatacgagccatcagttccctcctacctctgatatacgatccagaccactataactctgactggaaagggaaccagtcaaagcaattatggatcttaagccagtttcagttagtttatagaggctgtgcacaaactgtctttgtgtcctttggttcaacttttggtgtagagccacattcctcgtcattgtttattttattttatttatatattttttagagttggatcttgctctgtcactcaggctgtggtgcagttgctctatcacaacttactgcaaccttgaactcctgtgctcaggcgatcctcccgccccagcctcctgagtagctgggactacaggcatgcaccaccgtgtccagctaattaaaacaattttttttttttggtagagatggggttttgctatgttgcccagcctggtcttgaagttctgggctcaagcaatccttcctccttgccttcccaaagtgctggggttacaggcgtgaaccaccatgcctggtcttccatttttttttttttttttgagacagagtttcgctcttgttgcccaggctggagagtgcaatggcgtgatctcagctcactgcaacctccacctcccgggttcaagtgattctcctgcctcagcctcccaaatagctgagattacaggcgcgcaccaccacgcccggctaattttttgtctttttagtagagacggggtttcactgtgttggccaggctggtcttgaactcctgacctcaggtcatccacccgcctcagcctcccaaagtgctgggattacaggcttgagtcactgcgcccagcttttccatcttattttaatgctaaaatcctgccccaaagtgaacatgggatatatgttatatatatgtttatccattgtgcatacactctgctctcatcttaaataggtacagcttttccaaacctcctgaatgtgtatgactctgttgtgtaatacagatctagtgaggcataaaacctaacttgtccttccccttttcaaagagggagcacctttggttcatcctggagactttctttttttggtttgcaaaccagtattgccaataaagctctcctttctctctctttctctttctttcttccttccttccttccttccttccttccttccttccttccttccttcctttcctttcctttcctttccctttctttctttctttctttctttctttctttctttctttctttctttctttctttctttctttctttcttcctttcctcctttcctttcctttccttcctctttctttctttctttctttcttttcttttcttttttctttcctttttcttttttttttcagagtctcactctgtcgtttaggttggggtgcgttggtacaatcacagctcactgcaacttccacctcccgggttcaagcgattctcctgcttcagcttcctaagtaggtgtgtgccaccacgtctggctaatttttgtatttttagtagagatgggttttcacatgtgggccaggctggtcccgcactcctggcctcaaacgattctcccgccttggcctcccaaagcgctgggattacaggcatgagtcaccgtgcccgaccttaaagctcttctttctattatttattcatcttgatggtcttttgaacaacaccccaaaccctctccttctgaagccatccctataaactttataaaaataatcagagaagacaaaacggggagaaatgaaaacaagccaaacttgcagcacatccaggattcactgccaggtcagcttgctctctgacctgcttcctactagctgtttggtgcctgttatcctagaatcacacagatcctagataacagtttccctttactgctctataggtaacaacttaaatattataaaacatgaagtttcagccaggtgtggtggctcacacctgtaatctcagcactttgggaggccgaggtgcatggatcacctgaggtcaggagttcaagaccagcctggtcaacatggtgaaaccccatctctactaaaagtacaaaaattagctgggcgtggttgtgggcacctgtaatctcagttacttgggaggctgaggcaggagaatcgcttgaacccgggaggtggaggttgcagtgagccaagaccgtgccattggactccagcctgggcaacaagagcgaaactctgtctcaataaaacaaaaaaacaaaacaaaaaaaattaagtttccccttgagatattctttcaggtcctgtgtaccagtgaaactactggcttcagctgctctgaaggaccacagaaggagctgagtcaccaaagaaggcagtttccgtctcctgatgattttgtctgctgtaccctgacccacattttccagcctccacaccctccatgatccctttaaaagtcccagtcccgaactccttgaggagattgatttgagagtcttctctcatcttctcgcttggcgccctgagatttttaagctcttttttttttttttttttgagacaaggtcttgatctgtcacccaggctggaatgtagtggcctgagcatagctcactgcagccttgaactcctgggctcaagcaatccttccatctcagcttcttgagtagctgggactacaggtgtgaaccaccatgcttggctattttttttttttttaatctttagtagacacaaggtcttgctatgttgcccaggctggtcttgaagttgtgaactcaagtgatcctcctgtctgggcttcccaaagtgctgggattacaggtgtgagccactgtgctcagctaattttttgtagagatgagggccttgctatattgcccaggctggtcttgaactcctggcctcaagtgatcctcccacgttggcctcccaaattgttggtattacaggtgtgagccaccacacctggcctcattaagctctttctctgctgcaaaccctgctgtcttggtggattggtacgttactgtgcagtgggcatatgaacctgttggttgtataagacttccagaaccttgcaaactcttaccaccatctcaccctgctttgttgggaaagaggttagagctgttataaaggagaacgtagagtgcattggttacgtatattcccaccatcatcatgaatgctgccctcaaaagctttcttaggaaactgtccatgacacaaggtgggattcaagctcaccgatcagcagttccataaaggtgaggccaggaggctgcagaaatggccacagtcacagcgggaacgccatagccgactgggaacatgatccacttcatgagtctattgatgcttgagtagttgaccactgtcaggttccgtgcagtgaggaagaggtgcacaccctccagcagcatccaggtgaaggcggccaggtagagatagtgcaaagcaccggcgatgatggagcacagcacctgggggaggagaaagggatgcctgaaggggttgtcagggtggagtatggccctaggacctctccttgacattggctttgggttcagagcacctgacatcagaccaagggcactaaaagtaaaggggaactggatgcagtggctcatgtctgtaatttcagcactttgggaggctgaggtgggaggattgcttgagcccaggagtttgagaccagcctgggcaacttagtgagaccccatctcaattatatttaaaaaaatagatagttgatagtcaaggatagctttggccacctgggcaccaatcccttcaacctgcccttgggactgaaagggtagcagaatgtgccacctccacctatgccactttgcaacagatcaccagaatttacccctccttttaaactaagactttgtatactttgagctatgtctcctttcctcatccacttcccccctcaacctctgagaacctccattctactctctactcctactgtattgcgtggtgactatagttaatatattatgaattttgaagttgctaaaagagtggattttgttctattttatttctttgtgacaggatctcactctgtcacccaggctggagtgcagtggcacaatcatagctcactgcagccttgaactctcaggctcaagtgatcctcccacctcagcctccctagtagctgggactacaagtgtgtgccaccatatccactaatttttgcagagacggggtctcactgtgttgcccaggccagtctccaactcctgggctgaagtgatcctcccgccttggcctcctaaagtgctggtattacaagcatgaaccgccaccccagtcctaaaagagtgaattttaaatgttttcaccacaaagaaatgataagtatggaagtgatagatatgtttattatcctggtttggtcatttcataatgtgtatgtctatggaaacttcacattgtaccccataattttatacatttattatttttcaattaaaaataaaatttagaaaaaagtttcactttagcataagagattattattatgattatgattcttttttttttgagacatggtcttgctctgtcacccaggctggagtacagtggttgcaatcatagctcactgcagcctcgaactcctgggttcaagcaatcttcctgcctcagcctcccaagcagctgggactacagacgtgcaccactgtgtccagctaattttgttattttttttgttttttttgtagagacaaggtctcactatattgcccaggatggcctcaaacgcctggcctcaagtgatctttccaccattgcctcccagtgtgcagggattgcaggtgtcagccactgtgtctggcccaagggattattttaaactgaaggcagttgagaagaagcagatacaaaaatagctctctgccctccccctatttgcctaaaagcaggacatacgtttttgtacttgtcttttttggggggtgagaacacttaaaatctactttgttagcaatttttcaatatagaatatattgttattgactatagtcatgatgtacaatagctctcttgtatttattctttccgtctagctgaaatttggtatcctttgaccaacatctccctaaaccccttccctgctgccttagtctctgctaacaaccattcccctctttggttttatgagtttggctattttagattccacacataagtgagatcatgcactgtttgtctttctgtgccttgcttatttcactcagcttaacaatctccaggttcatccatgttatcacaaatggcaggatttccttctttttctgaaggctgaatagtattccaggacattagtttacaaaggcattcctcatacctattctcttccttctaccctcctacccttgctatgggggggacaaaagttgatcactaagacaacttatttatttatttaagatggagttttgctcttgttgcccaggctggagtgcaatggcgcaatcttggctcactgcagcctctgcctcccgggttcaagcaattctcctgcctcagcctcccaagtagctgggattacaggtgctcatcaccacgctgggctaatattttgtatttttagtagagacggagttttgccatgttgaccaggctggccttgaactcctgacctcaggtgatctgcccacctcagtcccccaaagtgctgggattacaggtgtgagccactgtgcccggccaccgagacaactttagatcctcattggtctggagccaacaccagaggaatctacaaaaccaatgatatggtttggctctgtgtccccacccaaatctcatcttgaattgcactcccataattcccaaatgttgtggggaggacccggtgggagataatttgaatcatgggggcggttttccccatattgttctcgtggtaggaaataaatttcacgagatctgatggttttatcaggggtttctgcttttggatcttcctcattttttctcttgcagccaccatgtaagaagtgcctttcgcctcccgccatgattctgaggcctcccctgccatgtggaactgcaagtccaattaaacctctttttcttcccagtcttgggtatatctttatcagcagcctgaaaatggagtaatacaaccaatgatactagtaagcctttatctatcactcatttcccagatatttgccttcccataatttgtgcccctagagagccaagatctttttcccttcttcaaaaattcatcattctttgtcaaaaacgctgtcgttctaaactacctctttgagaatgcctcgttacctgggtatctcccatgtatatatgaaatatgaatatatgttaatgaacttctgtttgctttttctcttatctgtcttttgttacatgggtcccagctacgatctcagaagggtagcgggaaaattatatttttctcctctacagacccaaggacattttattaaggaatctagtgcagcattgctccatgagctcagtgtaccttggggcagaaagggcatcctctgagacactgtcagtaccttgggttcagttcgatcaatccccacgaggaagaggaggtgggccaggaagaggcagagcgagagctgcagatgcagtgaggtgctggtgttccggatggctttacacaggagaaaagtgagggccgccaggaggaggcacagcagagagacgctcagccccacgtaggtgatgacagtcagcacgggatcctcctcctgggaccgagaaaaaaagttcacagtgatgctttcctgcactgggattatggctccctccttgaactggggcatcctagacacaggcaccaagcccagtggtagtgtgggaccgttagactgctaatgtagattgctaatgtagactgctaatatacactgctaatatagatggctaacgtagattgttaatgtagactgccaatgtagattgttaatacagactgctaatgtgattgttaatgtagactgctaatatagattgctagactgtcttttttattttcagctttattgaggtgtatacttaatgtatcaaaaattactcatattaaatgtatacactttgatgagtttggacatatgatttttttcccctaaaaaaagtagaatggcagttaccagaagctggggagaggagagagagagaatagggagttggttaaggagtgaagagtttcagtattgcaagatgaaagagttctggagatggatggtggttgatgattgcacgatatgattgtactttactgaactgtatatacatttaaaaatggcttagatggtaaattttatgttctgtgtattttaccacaatctttacaaagtgatttttgggccatggtgtctcacacctgtaatcccaatgctttgggaagctgaggtgggaggattgctggaggccaggagttcaagaccgacctgagcaacaagtgagaccccgtatctaaaaaaaaaataaagtgtctttgtatgcagagggcttgtgctatgcagtaccagtttgatcagagagctcatactaatgaagggatttaaaaaacttttttaagttcagagatacatgtgcaggtttgttacataggtaaacccctgtcgcgggggtctcttgtacagattatttcatcacccaggtattaagcttagtacccattagttatttttcctggtcctctccctcctcccactctccaccctctttgtgtctgttgttcccctctttgtgtccatatgtctcctcatgtagctcccacttataagtgagaacacgagtatttggttttctgttcctgtgttagtttgctaaggataatggcctccagctccatccatgtccctgcaaaggacatgatctcattcttttttatggctgcatagtattccatggtgtatgtattccatatgtaccacattttctttatccagtctaccattgatgggcatttaggttgattctatgtctctgctattgtgaatagtgctgcagtgaacatacatgtgcatgtgtctttatgatagaatgatttatattcctttgggtatatacccagtaacaggattgctgggttgaatggtagtcctgttttcagctctttgagaaagtgacatgctgctttccacaatggttgaaccaatttacaaccccaccaacagtgtgtgttcctttttttctgctacctcaccagcatctgttattttttgactttttaatagtagtcattcatgatgtggtttatagtaatcatggtttttttttttttttttttttagacagagtctcgctctgtcgccaggatggagttcagtggtgtgatctcggttcgctgcaacctctgcctcccaggttcaagcaattctcctgcctcagcctcctgcgtagctgggacaacaggcgtgtgccaccacacctggctaatttttgtatttttagtagagatggggtttcaccatgttggtcaggatggtcttgatctcctgacctcgtgatctgcctgcctcggcctcccaaagtgctgggattacaggtgtgagccactgtgcctggcccagtaatcatatctttgccctggggtcctatagtctgagcaactgaggtcaaccatgtaggcattgcatccctatgtgaatgatcccccaatacacaccctgaacaccaaagctctggtgagcttccctggctgacaacacttcacatgcgttgtcataagtcattgctgggagaatgaactgcatctgtgtgactttcctgggagaggacactggaagcttgcaccaggtttctcctggacttcttaccttgcgtcttttccacatgttgatttttttttttttgagatggagtcttgctctatcacccaggctggagtgcaatggcttgctctcagctccctgaaacctctgcctcccaggttcaagccatcctcttgtctcagcctcctgagtagctgggattacaggcatgtaccactatgtttggcgaatttttgtatttttagcagagatgggtttttgccatgttggccaggctggtttcaaactcttgacctcaggtgatctgcccgtcttggcctcccaaagtgctgggattaaaggcatgagtcaccatgctcggccttttttcagtttttttttttttttttaatagcacttattaccacttagtaggggctcagaaagtatttgctggaagaataaaacatatacatcatacctggctggtcagggccatcaggacagcgaagctggacaggtgactgcaattacacatggtgtgactcttgttcacgtgtatcaggaagcagccatccctggaccactggctgccctgccctgtgctcttccagtagacacagaagacctttttggtactgggggtcatctgaaaatagaaaatagaaagggctcattgtctttgtctttctttctttcttttttttttttggagacaaaatcttgctttgttactcaggctggagtgcagtggctcaatctcggctcactgcaacctccgcttcctgggttcaagcgattctcctgcctcagcctcccaagtagctgggattacagacgtgcagtaccacaccaggctaatttttgtattttttgtagagacagggtcaaccgtgctgcccaggctggtctcgaactcctggactcaagcaatcttcctgcctttgcctcccaaagtgctgggatcatacaggcatgagccactgcatctggccagctcattgtctttttcctcaggagggacagttctcagtgttggcctatgccagggtgccacctgctaaggcacctgtgtgaagagtgactcaggtgatttctgttttgtttgtttgtttttgagacggggtctcattctgtcacccaggctggagtgccgtgacgcaatcacagctcactgccaccttgacctccctggctcaaacgatcctcccatctcagcctccagagtagctagaactacaagtgtgtaccaccatgcccagctaacttttgtatttttagtagagatggggtttcaacatattgcccaggctggtcttgaactcctggcctcaagcaatcctcctgccttggcctcccaagaggctgtggttatgggcatgagccgctgtacctgatttctattttatgcggccaccaggacccccgatccataaccgcagctcttttgggattttatgtaacataaaataaagcaaaggctccctgggaaccacagtttcaagagatttctttggttttagaaccttgccccaaccatgggaggaaaaaaacaaaaaaaaacccaaaaaaagcagtggagtctgaagctctcatgtttttccctaaagtctctctaagccaaatgtccctggtcgttgtataatcaattttgtctctactcccttacaacacaataattgcttatgcaatgagaggcatgatataggaaagaaaagtcatgaggagagagaataaaatgagcctttgaagccgggcacagtggctcatgactgtaatcccagcactttgggaagccaaggcgggtggatcacctaaagtcaggacttggagaccagtttgtccaacatggccagacatcatcgctactaaaaatacaaaaatgagccaggtgtggtggcacttgctcgtaatcccagctacttgggaggctgaggcaggagaatcgcttgggcctgggaggcggaggttgcagtgagctgagatcgcaccactgtacttcagcctgggcgacagagactccgactcaaaaaaagaaaaaaaaaaaagaaaatagaaaaacaggtcggatgaagtcgttcatacctataatttcagggttttaagaagctgaggtgggagggttgcttgaggccaggagtttgagaccagcctcgacaacattatgagtccccctctctaccaaaaataaaatagttagttgggcgtggtggcacacacctgtagttccagctgctggggaagctgaagtgggagagtcccttgagcccaggagtccgaggctgtagtgagctatgattgtgcaactgcactccagcctggacaacagaatgagaccctttctcaaaaaaggtaaagatatagatcaattaactttaataataaattttatttaacccactatatccaacatagtatcttttaaatatatcagtataaattaataaatataatcaacatagatattatcaaggagatattttacattcctttcttcttctctttctttttttctgagacggagtctgactctgttgccaggctggagtgcagtggcgcgatcttggctcaccgcaacctccgcctcctgggttcaagagattctcctgcctcaccctcccaagtagctgggactacaggcatgtgccaccatgcccagctaatttttgtatttttagtagagatggggtttcacgaagttggccacttgatcacttgacctcatgatccccccaccttggcctcccaaagtgctgggattacaggtgtgacctttcttcttttctttttttgttttgatttactttttaaaaatgtatttttaatttatacattataattgtatatatttatgggatacagtgtgatttataatacttgtatttgcataccatgtagaatgattacatctagctaattctttttttttttttttttgcatttattcttattggttctctgaaactcctggatctgtggtttggtgtttgacattggtttggggaaattctcagtcacttccctctctctcttcctccctccctccctccctccctccctccctccctccttccttccttccttccttccttccttccttccttctttcctctttgtttctttgtttcttttcttcttctccttactgtttttcttcttcttccgacagtgtcttgctctgtgccccaggctggagtgcagtggtgcaatcatagctcactgcagcctccaactcctgggctcaagcaatcctcttgcctcagcctcccgagtagctggaagtataggagcatgccaacctgcctggtttaaatcaagctaattgttttcttcttattaagtcttcaaaggctgatttacaagatgtaaatctggaaatactgtcttcaaaatctcgattcagaccagctacatttcaaatgctcaatagcgacaggtgctcctgactacgaccctgaacagagtgggtctagaaccacagcctgggatgatacacacatcgtttggcctgcctccttgagaacccacaagctcaaatcatacctgtgacccaccttcacgtgctggaaagtcagcgtcacagacttggagagagacacgttccttttgggtccaatagcagcactcacaacctgagagttcagatacacttgatctttcttatccatctcttcaaaaaaagttgcatttatgatgtttccaagagaagaatatgagataaaggcaatggcactgggacctgaggaaacagaaagatggaatcttttttcttttcttttctttctttttttttttttttttttgagacggagtctcgctcttgtcgcccagccaggctggagtgcagtggcgtgatcttggctcactgcaacctccgcctcccgggttcaagtgattctcctgcctcagcctcccaagtagctgggattacaggcactcaccaccatgcctggctaattttttgtctttttagtagagatagggtttcactatgttggccaggctggtctcaaactcctgacctcaggtgatccacatgtcttggtctcccaaagtgctgggattacaggcatgagccaccatgcccggtctgccgttttttagaagagttgttctcagatggagcttaaatcctgtgatccctggaggattcgttttaacagagtgctggcaccgggcatggtggctcacacctgtaaccccagcactttgggaggctgagggggtggtggatcacttgaggtcagaagttcaagaccagcctggtcaacatggtgaaaccctgtctctactaaaaatacaaagattagctggttgtggtggcacatgcttgtaatcccagctacttgggaggctgaggctggagaatcgcttgaacccaagaggcggaggctgaagtaagctgcgatcacgccactgcactccagtctgggtgacagagtgagactccatctcaaagacaaaaaaaaaaaaaaaaaagatgttttcctacaaacaacccactttttgcattttctggaaacttcaaagtctggtaacactgagacaatgaataataatctatttcttcctacaaaggctgtaggtacggtgggcaccctggctcgaatccctggcattcttggtttctttaatatgctgattaattctgctgtaagcatcggtgattctgcctgggaacttccatgggcgtgaatttgtgtttggcctgcacagaggacaggctggaagagcttgaaagttcagcccccggagcaaccctccaccaatgatagatcagagcagatggacagacgtcctagctccctcttctcgaatgggacagctcagtgagattgagccccaggtaccccaacagcaagctgctcactcaggtacctacctcattggctgcctttacttgcctgtcttactttgcctcttacctactgtgatagttcattttacatgtccacttggttaggccatggtccccagacatgaggcatggatgttgccatgaaggtgttttaaagatgagattaatatttaaatcagtagactgagtaaaacagattgcctgctataatgtgggtgggccttatccaatcagttgaaggcctcaagagaaactagactaaggtctcctgagaaagaggtagttctggcctcagactctctttggattcaagctgcactatcagttctaccttgtgtctcctgcctgcctgcccaccctgcagattttggacatgtcggccttccatagtcacgtgagccaattctttaaaatgactctcctcgtccctcctcatctctttctttccttctctctccccatctctctctttccatctctctcccccatttctctctccccatctctctctttcgatctctcttttgatctctttccacatctctctctttccatatatctctccccatctctctaattccatctctctctccctatctctctttccatctttctccccatctctccccatctctcgaattccgtctctctctccacatctctctctttccatctctctccccatctctctctttccacctctctccctctctctcttttcatctctctctccccatctctctctttccatctatctctttccatctttctctccccatctctttctttccatctctccatctcgcttttgatctgtctcttcccatctctcgcttttgatctccctctgcccatctctctttttccatctctctccccatctctctttccatctctctctccccatctctctctttccatctctctccccatctctctaatttcatctctctctccccatctctctctttccacctttttccccatctctctcttttgatctctctctccatctctctttttccatctctctctctccatccctcttttcatctctttctccccatctctctctttccatctctctccatctctttctcctcatctctctctttcgatctctgtctttccatctctctctccatctctccctccccatctctctctttccatctctctccatctctttctccccatctctctctttcgatctctgtctttccatctctctctccatctctccctccccatctctctctttccatctctctccatctctttctccccatctctctctttcaatctctgtctttccatctctctctccatctctccctccccatctctctctttccatctctctccatctctttctccccatctctctctttcgatctctgtctttccatctctctctccatctctccctccccatctctctctttccatctctctccatctctttctccccatctctctctttcaatctctgtctttccatctctctctccatctctccctccccatctctctctttccatctctctccccatccctctcttcccatctctctccccatctcttgcttttgatctctctctccccatctctctctttccatccctctcctcatctctctctttccatctctctctactcatctctctctttccacctctcttcctatctctctcccccatctctctctttgcatctctctcctctccatctctgtccccatctctctctttccatctctcttcccttctctctctttccatttctctccccatctctgtctttccaccactctccccatctctcttttctcatctttctctttccatctctttccctatctttttccatctctcttcccttctctctttccatctctctccccttctctctctttccatcgctgtccccatctctctctttccatcgctctccccatctctctctttccacatctctctccccatctaattccatctttctctccccatctctctcttcccatctgtctctccccatgtctctctttccacctctctccccatctttctctccatctctctttacccatctgcctctccacatctgtttctctccatctctctcatctcttgctctctgtctccatctctctctctctctctctctctctctctctctctctctctctctctctctctcccctcttcccacacccccccacaccctacactcttcagctctttagttgtgattctctggagaacactgatgaatacacccactgttgttcctggggatcacctcccaaagaaacttctcacacttctttcagggtttgcttctgggtgaacccaaaccgggacacaggcagaacagcactcccccaccatcccaaattgcaaagtccctcccatactgaataacagaaaacctccattttgggaaaatgtcttttttttttttttaaagggaaaatctccaatatcgtagtttgagggtaaaaagcccatgaggggagagcccagtgggcttgtttccccatgactcacacaatgacatggctctgtgtgaaggattctgaatgcagccatcaggcataccttgtgtgtctccctggatgatgtcactgcaacggatgtccattgagttcatttggacgttcaagttgaatgtctttctttcttcagagcaattgtctgtaatcgcttgagtttcaatagctggtaagaaaagcaatgggcaggcttagtgatattgtaagaaactttaaaaatatgcataggaacaggacatggtggtgcatgcctgtagtcccaactactcaagaggctgaggcagaaggattgcttgggcccaggaatttgagcccaggcaacacagtgagatgctgcctctaaaaaaaaaatgttcatagcaacataaatggctcacatatactgaatgtctaggatgtgtcgggcactgagctaagagtcttacacatgtcaccttataaacctataacttcatcagggacaactctatagatgaggaaactgaagtcagaagttaggtaagactctaattcctgaaaccaagttcttaactaacagctcttagcatacacctttgaagatacagttctatttctaggagtttattctcagaaaacgattgtggatggagggcagatttagctacaagaaagttcatagcagcttagatgataatggtggaaaatgggggattatctagatgttcaacaagaggtgattgattaaataagtgatgatatgggctgggcacagtggctcatgcttgtaatcccagcactttgggaggccatggcaggtggattgcttgaggccaggagttcaagaccagcctggccaacatggtgaaaccccatccctactaaaaatacaaaaattatctgggcatggtggtgtgcacctgtaatctcagctacttgggaggctgaggcacgagaatagtttgaaccggggaggcagaggttgcagtgagctgagatcacgccactgtactccagcctggatgatggagtgagactctgtctcaaaaataagtaagtaagtaaataaataaataagtgatgatatatctctgtggtggggaaccagggcttcaaataaaaataaagtcacaaatgaattgcaatcaagaaaaactcatgagaaaaaaggtaaccatgtgagtgatggatgtgttagctaatttgattgtggtgatcattccacagtatatatgtatatcaagtcatcctattgtacaccttaaatatatacaattttctttatcaattacaccttaataaagctaaaaaatgttaagctcatgaaaatatgtatcttaaaaacagacaacccaagactggctgtgagatggaaatcgttgaattgggtgatgggtgcatcagggattttattctcctatttccttttgtgcatattaaaaggttaaaaaaaaaaagaagcaagcaacaaaacagcacatcaagaatgacactattttatggctgggtgcagtggctcatgcctgaattcccagcacttttgcaggctgaggccagttgattgcttgaggtcaggagttcaagaccagcctggccaacatggtgaaatcccattctactaatacacaaaaattagctggtcatggtggcaggcacctttaatcccagctactaggaaggctgaggcaggagaattgcttgaacccaggaggcagaggttgcagtgacctagatcatgccactgcattccagcctgggcaatagaatgagactccatctcaaaaaaaaaaaaagaaaaaaaaaaaaagaatgacattaatgacattctagaaactactactggtttgtctaatattgactctcagtttttgaaaagtttacaagtatttactctaattatgtattaatgtttttggcctactgtttcattcatttagtacgttttaatgaatagaaattcttgagctcagtgtaagtgaatttattgttattattattatttttgagatggagtcttgctcttttgcccaggctggagtgcagtggcttgctctcagctaactgcaacctctgtcccccgggttcaagcgattctccttcctcagcctcacaagtagctgggattacaggcatgcaccaccacgcctggctaattttttttagtagaaacagggtttcaccatgttggccaggctgatctcgaactcctgacctcaagtgatccgcctgccttagcctccaaaagtgctaggattacaggatgagccacctcatcctgcccacaatgttaatttcatcatccattatattatcgcttgttactctttgtcatttttatcaaacctcaatttgacttgtttttatattatttaatattttctacattaaactatgtgtttcctgtaaaaaagaatgacactattttgacaatatttcataatattaaagagtggaaagatagaataatcataattatagcaattactaccgtagtttttcttctttcttaaaagtttgagtcgtttagcttctgagggatcctagtcctaggtgcattacatgcactttcattatctctattaaaatttttttttgagacaggctctcactctgttgtccaggctggagtgcagtggtgcaatctcagctcactgcagcctcgaactcctgggctcaagcgatcctcccacctcagcctcctaagtagctgggacctcatttgcacaccaccatgtccagctaatattatcctcattttattgacaggagaatgaagcccaatgaggtgagggcactggtctcagatcaaacagttaggacgtggcaaaatcaggagagatgagatttacttgcaatctggaaaatggtttaattttgaaccaaagtatccagattccagttttccaagaagaataggcactgactttttcaaagcctgctgtgtgtgtgttttttttttttttttttttaatttaagatggagtcttgctctgtcacccaggctggagtgcagtgatgtgatctcggctcactgcaacctctgcctccccagttcaagtgattctcccacctcagcctctggagtagctgggattacagtcatgagctaccacgccccgctaatttctgtatttttagtaaagattaagtttcaccatgttgcccaggctgatctcaaactactggcctcaagtgatccacccaccttggcctcccaaagtgctgggattataggtgtaagccaccatgcccagcccaaaacctgttttttttttttttttaatgagacaggttcttgttctgtcatccaggttggagtggcaatggcatgatcatagttcactgcaccctcaaactcctggactcaagccatcctctccctcagcctcccaagtagctgagaccacaggtacaagccactgcacctggcaaattttaaattttttttaaagagatgggggtcttgctatgttgcccaggccagtcttgagctcctgggctgaattaaccctcccgcctcagcctcccaaagtgctgggaatacagtcgtgagccatcatgcctggtcctcaaactacatttaagtgaaaattccagacctgggattggaaactattggcaatcttctgaataaacaactttattgaggtataattgatgtctaaccaactgcacatattaaagtgtacaatctggtgagttttgttgggtgcacacacctctgaaatcaacaccacaatcaaggcaggaagatttccatcacccctaatagtttccccagattttctcatgcctctgccacccctccctcctgcccctccctgtcactctagataagtttgcgttttctagaatttatataaatttttgtaatttacataaagggactcatgtggtgtattcaattttttttttctaattgcctaacccagatcccagctgctaaccagtccccagggtgtatcagtcctcattattgtcttacctacactatcgttttggattttcaggactttttgttctggatctttcaaggcagtttctagaactttcgattccacatcccggagaatagtggtagctgtggatgagatttcttgtctcccttctgttctccataaagtctgattggtgagaagtgactcaaatttgtccacaatcttttgcagctttgaagacataaagaattttcattttttaaaaatgtaatctggtaagtcccatatccaaaagaacagtagaaagcatgagaaagcaggctctggagctggaggaaccacgttcaaatcctggcacttcatcatgtcccagctttgtgaccttgggcaagtcactcaatcactctgtgccccacgacaggaaaaggaactcaaagggtttttctggaggattaaatgagttaacagatgctcttcttttaggacagtgtctgtatctggtaaaagctatgtaagggtgagtcactattattatttttgagacagagtattgctctgtcgcccaggctagagtgcagtggtgggatcttggctcactgcaacctccagctcctgggttcaagtgattctcatgcttcagtctcctgagtagctgggattacaggtgcacaccgccatgcttgcttaatttttttaatttttttttttgtatagacagggtcttgctatgttgcccaggctggtctggaactcctgggctcaaacgattctcctgccttggccttccaaagtgatgggattataggagtgagccaccgtgcctgattgggttagttattattaacgttttttgccaacaaggtagtgataagtttgttagaaatagaccagtggttctcaacgggggggtgattctgctactccctccacagggcacatgtggcgatggctggagacattttcggttgtcactgtcgcaacaagggagtggttgccactattgaagcagcgtcactgtctggggtaaatacccagagtttgtcatcttgcgccaagatgaaggacatggacacacacgaggagtgagtttaggagtggaggtttaataggcaaaagaaaaagaaaagagggcagggtgcggtggctcatgcctgtaatcccagaactttggaaggccgaggggggtggatcatctgaggtcaggagttcaagaccagtctgaccaacatggtgaaaccccatctctactgaaaatacaaaattagccgggcatggtggcgcgtgcctgtaatcccagctagttgggatgctgaggcaggagaatcgcttgaacctggaaggcagaggaggcagatgttgtagtgagccgagatcacatcactgcactccagcctgggtgacagagtgagactccatctcaaaaaaaaaaaaaaaagaaaagaaaaaaaaaaaagaaagtagaacagctctctcccttgcgagagagagggatgcccgaaagaaagcaaaatcctgcccaccgactagattttatattcaggcactagattttatagtcaggctgaggaggcggtgtctgaattatgtagggcccacagattggttgggccaggtgcgacatttacttactgctcggggaaggctggttgccctacccacttggccagtaccatcttgtctgctccttactgtacacgtgactggcaaagagaagggaagatggagctgccattttgatcatgtctagtcccaggcagccttttcctattggcacagctgctggcattgacccataagcttccagcttgcttgtctatgtccgcagcttgattttacaggctgctctttgttagaaaagaaaatttggggctgctcttcattaaaaggaaaacctcactgaggacttccgtaccctcaccatctgcctaagtaatttcttcttaactcctatatcattgtgtatttatttatttatttttgagatggagtcttactctgttgcccaggctggagtgcagtgacgtgatctcagctcactgcaacctctgcctcctgggttcaagtgattctcctgcttcagcctcctgagtagctgggattacaggcatgcgcccccatgcccggctaatttttgtgttttttgtagacatgggggtttcatcatgttggccaggctggtcttgaacttctgacctcgggtgatccacccacctcccaaagtgctgggattacaggcattagccgccatgcccggcctgattacttgattctttatttgttcattacttcagtgatcattccttgaactcctaatttggggttggtcttattcccttcctcaaaaagctcacagtctagggattgattacatgatgtaatcacatatttatataaatgccgtcagttggccggagacaataatggataccattggatacttggatgtcttttgcagcagtgcagcaggccttaatatactctctcttggcctgtctttcttggtctgggatagattcctgtctttagatggcaacacacacacgctcatacacacacactcacacactgtcatatgtatgtacgtacatgcacactgtgtgtgtctatctatacctatatctatatatatatataagtagatacagatacagagccctcttggtatacgcatggcattggttccaggatcgtccatatatgctcaaatccaatccatgcatactcaagacccatggaactcactcatgaaaagtcagtccttcctctttgtgagttttgcatcctgcctatatatacatatatatatatatatttttttgtttgtttgtttgttttgttttgttttttgagacggagtcttgctctgtcacccaggctggagtgcagtggcaacatctccactcaccgcaacctccgcctcctggattcaagtgattctcctgcctcagcctctggggttgctgggattgcaggcatgtgccatcatacctggctaatttttgtattttttagtagagatgaagtttcaccatgttggccaggctggtctcgaactcctgacctcaagtaacatgcctacctcggcctcccaaagtgctgggattacaggcgtgagccaccacgccaagcccggcaatactgtagttttgattcacatttggttgaaaaatgtcctcgtgtaagtggatccccgcagttcaaatgtgtgttgttcaactgtatatatagtgatatatctatagtgagctggataatgatacatatatagtggtatacctaatggtatatctgtatctatctatctatagatatatgtatacataccacaattatgcataatatataattgtatataatatatgaatatgtactattgtgtagtaatatgatattatatggtaataatatattatgtatttatatataacatattctttgtcctaaataatacattatatatgtatatataatatatattttgccctaaatccatccccatttgctcactttgggctttgtaaatatttgttactgatgtttgttacctgggaagggtctggggatcagcctccactcacctctttcctgccctcggttgtctttgaggaggtggtgtctgcaaaagacatcatgatggagttactattggaactgagagtgaccaggcagaggggtgggcaggtggggtaagtaatggggtgagcaactttgcacctagaaggtaaaagcctgaattcatagtctttatctgctgtttgttgatttttaaaaaattttaaattttatttaaaaaattttttattttttatttttattttgagacagagtctcactctgttgcccaggctggagtgcaatggtgcgacctaggctcactgcaaccttcacctcctgggttcaagtgattctcctgcctcagcctcctgagtagctgggattacaggcacgcacctccaggcatggctaatttttgtatttttagtagagatggggtttcaccacgttggccaggctgatctcaaactcttgacctcatgatccgcctgcctcggcctcccaaagggctgggattacaggcatgagccatcgcacctggctttttttttccctttttttttttagatagggtctcattctgctgcctaggctggagtgcagtggcacaatcttggctcactgcaatctcaatgtcctgggctcaagcaatcctccacctcagtcccccaagtagctgggactgtaggtgtgtaccaccagacctggctaaattttttttttttgtattttttgtagagatggggtttcgccatgttggccaggctgatctcaaattcctgacctcaggcaatccacccgccttggcctcctaaaatgcaaggattacaggcgcgagccaccgtgcctggcctccaaattcttttattccatcttgactggaaattagaactgaaatgtccgagaaaacagaaaattagaagcctcttgtgtttaaagtcagcctggctgggaatgataaccgaaacagaagcatcagtgtctggtcatcagctgttaatgaagacttttgtgttggtttctgtgcttagtgaggacatctctgctttagaaatttgaggaagggtgcacctgtagtcccagctgcttgggaggctgaggcaggaggatcatatgagcctaggcattcgagaccagcctggccaacatggcaaaaccctgtctctactaaaaatacaaaaattagctgggcatgttggcgggtgcctgtaatcccagctactcgggaggctgaggcaggagaatctcttgaacctaggaggcaaaggttgcagtgagctgaaatgacaccactgcactccagcctgggagacagagcgagactctgcctctgaaaaaaaaaaaaaaaaaaaaaaaaaagacaaggaaagtctagcaaatgtttacatatcttttatcatcatgctgaggttaaatctgtacttattctaaattttggttttcagctcagtctatttgcttaaaagcacaaacagctttgttttaatactgaacattttatcttaagagttcaagaactttgacttacaaccctgagtctagaatatgtttgttataggaaaccgtatttattgtagaaaactgcccttttgaaccaaagctgcacactttatcattgggtgggggtgtctgttgcttagagctgccagccttggtaataacgaaccccaaatgggctcagtctttataaaaggacggtgcagacctcttaacattaggaaaacaaccaaaggcattttccttttttgtaaaataagacaagtttaagagattaacatcagaacccaggtagaatcacagtctgcttctacactgtcaatagaggtgcgcattgcttagtaaaagacagatttatggctgagtgctgtggcttatgcctataatcccagcactttgggaggccaaggcagaaggatcgcttgagaccaggagtttgagatcagcctgggcgacatagtgagaaccccatctctacaaaaaatgaataaattagccaggtatggtggctcatacctataatctcagccactcaggaggctgaggtgggaggattgagcctggaagttcaaggctgcagtgtgcaatgattgtgccactgtactccagcctgggtgacagagtgagaccccatctcttaaaaaaaaaaaaagtttctctcttattatccctacggtagtcaatacctcatgggtggtctaccaagtctcatctcttttctcatatagactttcccatccatgttttccatgggagtggtcatgtttacatgacacagtatctctccctggacacggatccacgggtgcacatggggctcaaactgggccaatgtattcattcccaaagaatttgcaatggggtctcagagagagagtcaactgatctctctttggttggttggggcaaaaaaaatggtaagatctggagcgggttggtggtcatatttccttttttttttttttttttttttgagacagagtttcactctgtcacccaggctggggtgcagtggcgggatcttgtctcactgccacctctgcttcccaggatcaagcaattcttgtgcttcaccctcctgagaagctgggattacaggcacccgccaccacacccagctaatttttgtatttttagtagaaatggggtttcgccatgttggccatgctggtcttgaactcccggtctcgagtgatctacccgccttggcctcccaaagtattgggattacaggcgtgagccacccctcccagccggtggtcatattttctgtcctgtggtctaggaagcagagaaagccagcctgcagtgaaagagaaggaaggagcagatccaaagatgattagagacagggactaggagatgcaccctgggggtgttgagttcccagttttagttaattccagaagcccagctgcattcctgtccttgcagggcatggctacgcatcgttttcataaacccattttttggcctgttagcctgagtgagtttctcttccttgcaattcaaagaatgtggtctcaatcaccaccttgtcacatcctccatctccaaactatagttccctttctcacccccttatttccctcaacttgaacttccttctttccttgtagttccctgcagaaaataaaaaccacatcctggtcccacaacaaatacgtcttttctgatgttagattcaataaaaaatgaggaaggactgccgcctgtaaaaagtcccagcactttgggaggatgaggagcgtggatcaagaaaaattagctgggcgtcgtggtgcacgtctgtaatctcagctacttgggaggctgagacaggagaatcgcttgagcccgggaggcggaggtttcagccactgcactccagcctgggctacagagcgagactctgtctcaaaacaaaacaaaacaaaacaaacaaacaaaaaaacaacaacagaggaaggaaggcaggaggacaaaaatgttcttaccctgacaggtgttctcattggaattactgaattgttcattcccagaatgcagtctatatcctgggacacattgacagtagaaacttccttcgacattgtaacacacagcgttaaatccacaatatacactatagggtggtgtacattcattaatgtctggaacacaaagaagcaattgggtcattcattcagcaaagatttattgagcagctactatgtgtcaggagttgtgctctttcccccatggtctgtcctggctttccgagacaaatcagtttaggtaatggttatcttggtttttcgctttcttcattgactttggtggggttctccaggaagcagacaatgagacgagaatataagtactttatttgggaggggatcccaggaaacactgagagggcagtcgcgaaatgaaacaagaaactatcttttctttttgagacggagtcttgctctgtcatccatgctggagtgcaatggcaggatctgggttcactgcaacttctgcctcctgagttcaagcgattctcctgcctcagcctcccgagtaactgggattgcaggcatgcaccaccacgcccggctgatttttgtatttttagtagacacggggtttcactatgttggccaggctggtctcaaactcctgacctcaggtgatccacctgccttggcttcccaaagaactgggattacaggcgcgagccaccatgcctggctgaaacaagaaactatcttaaatgaacggccaagtttccaaaacagcccccattttgcctcccttttgctcctgcttctggataacttgcaaattatccctggccaggtgcagggttcacgcctgtaatcccagcactttgggaggccgaggcgggaggattgcttgagctcaggagtttgagaccagccgggacaatatagtaacaatccatctctacaaaaaaaaaaaaaaaaaaaaaaaaattagctgggcatggtggcacgcctgtagttgcagccacttgagaggcttgatcccaggagttggaggctgcagtgagtgtttttatttattttgatcagagtctcgatctgttgcccaggctggagtgcagtggtgcaatctcggctcactgcaacctctgcctcccaggttcaagctattctcatgcctcagcctcttgagtagctgagattataagcgccccacaccatgcccggcaaatttttgtatttttagtagagatggggttttgtcatgttggccagactggtctcgaactcctgacctcaagtgatctgcccacctaggcctccccaagtgctgggattacaggcttgagcaactgtgtccagcttgcggtgagctttgatcatgccacagcagtccagcctgggcaacagagcaagaccctgtctctaataataatgataataaaataataataataaaaaataataatacttctttaccgttacatgtctccaaggggaatgtgaatagtttctgcccagatccagaagtatatccatggttgcaggtgcagtgagtgttattgacacaggaagcatttggggggcacttagcacaggaagctgcagggagaagagaggcaggttaaatggactggggtcacaaactctcctgttataattaggccctgcctcttgatcacctgaggtcaggagttcaagagcagcctggccaacatactgaaaccccatttctactaaaaataccaaaaatagccaggcgtggtggtgcatgcctataatcctagctactcaggaggctgaggcaggagaattgtttgaacctgtgaggcggagattgcagtgagccgagattgtgccactgcactccagcctgggtgacagagggagactccatttcaaaacaaatatatatatttgttacataggtatacacgtgccacgttggtttgctgcacccatttacattaggtatttctcctaatgctatccctcccccagccccccactcccctgacatattatatatgtaaataataataataatgaggcctcgcctctgggcagggcctctcaaggctgaggaagcctgtgccttttcctcttgtgagatctaagcacgttaaaaaattagagtggccaggcgtggtggctcactccgcctggtgaggattttcacatggtgaaaccccgtctctactaaaaaatacaaaaattagccgggtgtggtggcaggtgcctgtaattccagcactttgggaggctgaggcgggtggatcacctgaggtcaggagtttgagaccagcctgaccaacatggtgaaaccccatctctactgaaaatacaaaattagccaggcgtagtggcacatgcctgtaatcccagctactcagggggctgaggcaggagaatggcttgaatccgggaggtggaggttgcagtgagccgagatcgcgccattgtgatcgcaccacggtgagaggcatggtgagcacgcctgttgacatctgtaattccagtgctttgggaggcccaggtaggaggattccttgaggctaggagttggagagcagcctgggtaacatagcaagacactattgctataaaaaataatttaaaaattagccagtcatggtggcatgtgcctgtagtcccagctactctggaggctgaagcgggaggattgcttgagcccaggagtttgaggctgcagtgagtcgtggtcatgtcattacactgcagcctcggcgacagagtgaggctctgtctctaaaacaaaaggacaaaaaaatttgaatttgtatggtaccatgggagggagattctgatcgtggtatatgttaaggtattttttctttaggcttcattacttatgaaaatgataaattcacagaattgaaaaaaaatccaacaataagtctcttattaccccagattctgagctgtctactgcttattgtatacttttcagaaaaataccaatccatatacacacatatgtgcatcatttttctttacgttataggaacatattacacatactgctctgttctttggttttcatgtaaaattttgcctgagaattttttccacagcttcacatgtggagcaacctcattttttttttttttttttttttttttgagacagagtctcgctctgttgcccaggccggagtgcagtggtgtgatatcggctcactgcaagctccgcctcctgggttcatgccattctcctgcctcagcctcctgagtagctgggactagaggtgcccgccaccacgcccggctaatttttgtatttttagtagaggcgggggtttcacggtgttagccaggttggtcttgatctcctgacctcgtgatccgcctgcctcggcctctcaaagtgctgggattacaggcgtgagctactgcgcccagctgcaacctcattattttaaaaggcattgcagtattccatcccggggatggacagtcccaaatatgctactgaaacaagggtgcaattgaccgtgcacgcaagtcttaatgcattttggattttgttttattttactttattttttaagagataaggtctcgctctattgtccaggctggcatgcagtggcagatcatagctcactgcagcctcaacctcctgggctcaagcgatcctcctacctcagccttctgagtagttgagattacaggcatctgccaaaatgcccagctaattaaaaaaatttttttgtagagatggggttcttgctatgttgcctaggctgttctctaactcctgggctcaagtgatccacctgccctggcctcccaaagcactgggattacaggtgttagccaccatgcctagcctttggaattttatttttggataaaaataaaataatatgttacataatttgtatattataatataatatacaacataatatataattatataagatataaattatatatttatacacatatatattgcatatacacacatatgtgtatatatatatatatatatatatatatatatatatatatatagtgttttctttatccacgtgttgattgatgggcatttgaactggttccatatttttgcaattgtgatttgtactgctataaacatgcttgtgcaagtatgttttttgtacaatgcttcttttcctctggatagatacccagtagtgggattcccggatcaaatggtagagctacttttagttctttaaggaatttccacaatgttttccacagtggttgtactagttttaattcccaccaatagtgtaaagtgttcccttttcactacatcaaagccaacatctattatttttttattatggccattcttgcaggagtaaggtggtattgcattgtgatttcgatttgcatttcccttataattagtgatgttgagcattttttcatgtttcttggcctatttttttttttttttaaagacagagtctcgctctgtcgcccaggctggagtgcagaggtgtgatctcagctcactgcagcctccacctcctgggttcaagtgattctcctgtctcagcctcccgagtagctagggttacagatgcacaccatcacacctggataatttttgtatttttggtagagatggggtttcaccatgttggccaagctggtctcaagctcctgacttcaagtgatccacctgcctcggcctccccgagtgctgggattacaggcgtgagccaccgtgcctggcctgttggccatttgtatatagaagaggtggtattgtactcagtggagcaaaatagtcacccactaagtatgcacaattctcctggggggacagggagaggtggtaccctctgccactcatttctttcctatctcttcccttcctgttcaggttctgcttagttcagagtgagctctgaaagtctattcttaatcttttccaggacttaataccttaccatactgagtatactggtttaaatagtgtcctcctaaaattcatgtccacccagaacctcaggatatgacttcatttggaaacagggtctgtacagatgtaatcaagttaagatgaggtcgtactggagtagggtgggcgcaggttgtcccttcatgtagtgtcagggtgtgggctagtttggtcttccttccaacatggtgacctcagtcaggctgcttatggcctccagaactctgggaatgggacttgctgttgtctgggggaggcttggcagagaggaaatgtggctgctggtggctatgaagtgagacttggagcagacggaaattttttggagtgaaatgtggcatgccctgtaatgcaaatacccttccatccttcctgtgaatgggccagtaaaatctaccttgctcatgaatgtcttcttttccatgaatgtcttcttttctgttttttttttttttaaatttggtaacatgcacataatatgaaatttaccatcttagtgcagcactattcacaatagcaaagacttggaaacaacccaaatgtccatcagtgatagactggattaagaaaatgtggcatgtatacaccagggaatactatgcagccataaaaaatgatgagttcatgtcctttgcagggacatagatgaagctggaaaccatcattctcagcaaactatcagaaggacagaaaaccaaacaccgcatgttctcactcatagttgggagttgaacaacgagaacatttggacacagggtggggaacatcacacccagggggtggggggcgtggggagggatagcattaggagaaatacttaatgtaaatgtcgagttgatgggtgcagcaaacaaatatggcacatgtatacctatgtaacaaacctgcacgttgtgcacatgtaccctagaacttaaagtataataaaaaaaataaatttacgatcttagccattactaggtgtacagttcggtggaatttaataccttcataatgttgtggaaccatctccataactgttttcatcttgtaaaactgaaactctgtacccactaaacactcactccaggctgggcatggtggctcatgcctgtaatcccagcaatttgggaggttgaggtgggcagactgtttgaggccaggagttggagaccagcctgggtgtcatggtgaaacccagtctctacaaaaaatgcaaaaattagcccacagtggcacgtgtctttagtcccagctactcgggaggctgaggcatgagattcgtttgaacccaggacgtggaggttgcagtgagccgagatggcaccactgcactccagcctgggtgacagagtgagactctgtctcaaaaaaagaagaagaagaaaaaaagagactctcaggttccaccctagacctgagcccctcccagattcttaacccacagaaaccaagagtgataaccagacaaactttttttttttctcttagattcaagaggtacttgtgaatctagagagagagtcccaggggaataacgttaaacagaaatgaccttgttcattattggttgacttgtttataatcagaatgataatgattagcattcctttgtctctccccactagaatgtctgcttcatgagactttgtgtgttttattttctgttctatctccactttgtactcactgtggttagcaaaaacagacaaattaaaaatcaaacaaaacgataaataaaaggctatccatatttgatataatgataaattaagcaaacaaataatgaaacacaggagcaagccttcccaaatattgctctcagaacaggcacttttctccagcccactggagaccatgagtggctccaggtccagcccttggtccacaagttctctgttctggctctgagcactcacttttggttttctgagtcacagctccaaagaggctcagcagaaagcagaggcctggaatagatgggaaacagaagggagagacatgaaacaattgaggagagattccaagaaatgccccaaggactgtgtatcagttatctatcactgtgtaacaaattacaaaaatgtagtggcttaaagctacatttttgttgagtatggagatctctcaaataactaaaaataggaccactgttggacccagcaatcccactactggatatctacccaaaggaaaagaaatcattatataaaaaagacacctgcactcatacatttacagcagcattattcacaataggcaagtcacggagccaacctaagtgtccaccaacagttgactagataaagaaaatatgccatatatgcaccatggaatactatgcagccataagaaagaatgaaatcatgcccttagcagcaacatggatggagctggaggacattatcctaagtgaactcactcagaagcagaaaatcaaatattgtatgttctcacttatatgtgggagctaagcagtgggcagacctggacatgaagatggagacaatagactctggggactttgcaatagccatgacttggctattgtgaatagtgctgccatagacatatgagtgcaggtgtcgctttgatataatgattattattttttttctttttttgagacagagtctctttctgtcactcaggcgggagtgcagtggcgcgatcttggctcaccacaacctccacctcccaggttcaatcgattctcctgccttagcctcccgagtagcttggattacaggcactcactaccacacctggctaatttttgtacttttagtagagaggtgggtttcaccatgttggctaggctggtcttgaacccctgacctcaagtgatccacccacctcagcctcccaaagtgccgggattacgggcatgagccactctgcccagcccaatgactattattatttttttgggtagatacccagtagcgggatttctgggtccaacagtagttctatctttagttctttaagagatctccaaactcaacaaaaatgttgttttaagccactaaaaaaggggaggatgtggggtggtgagggttgaaaaattacctattcggtacaatgtttaatgtttgggtgatgggtacatcagaaacccagtctccaccattatgcatgtaatatccatataacatacaagcacatgtacatcttgaatctaagaaaaaaaatgtttgttttgttatcactcttggtttctgtgggtcaagaatctgggaagggctcagctgggcggttctagcttgatggtctcatatgattatagtcagttagtggatggggctgcaacggctgagaactagctgggcattgtcccttcacctgttgtctcagggtgttgggcttgtttgggcttccttcaaacatggagacctgaagcaagctgctttaatggaacatctaagctctaagcatgagtgtcccagctgatgaggctgcatttcctcttgacactcatccctgaaagtcacctggctctacttccatcatattcccttggttacaagcaagttacaagctcattcagattcaagtggagaagaatcaaattcttcctccttatgagagaccagcaaggttctagaaacacatttttgatgggggatattatttccacctttttggaaaattgtctgctcaggctggctctattgtggctggtaaagagccctttgctcttccccatgcctttccaacatccgatgatgtcatcagtcatgttcctgcttctgcaaagacctaaagatgctggacagatggactgctttttttctgtcacttcagctttgcaacgactttagcaggaaagtgctattagcatcatctctgcttttcagattaagaaatggaggcacagagaaggtaagtaacttgctccattcactggggctagtcagtggcagagctgaggttaaacacgggttctgggttctagctgataacccattacaccacatagcctctccttcagaaatcccacagggcactacctgcatggaagtgctgttcagattgtagacactgtaggttggcatgtttattgtgacagtgacttgtccttttttcccccggcagatgccactcaccagatctgactggagcctcaaagtcccgtagagagtggtatgtgacttggtcatttagggcagtgcagaccaattgtaggattttggagaagaggccctgggggctaactgtgtgactcttcaggagaggtaatggcagcaatctaaatccttctggatctctctcttgagtttccaattgctgctatcacaaattaccatgactgtagtggcttaaaacaacactgatttattattctcttacaggtctggaagtcagaagtcttaaatcagcctctataggctaaaatcaagaatgttagtagggctggtttcttttggaagctctaggggagaatctgtctccttgccttttccagcttctagaagctgcctgcatttcttggctcacggacccttcctccttctttaaatccagcagcacagcatcttctcgtcttcctgatcttccacctccctcttaagaggacctttgtgattattatattaggccccctggaaaattcagggtactacccccatattaagattcttatcttaatcaacatctgcaaagtttcttttaccatgtaaggtaacatattaacaggttccagggattaggatgtggatgtctctggggggactgttatttttcttcctgtaattctcacccttcccccaagaagatgccaggtctggtttgtgatcagttacttatgcaattgcattcacagaacattttgaatattctcagctgggcttaatgtcaggctgatgtttcctttaaagtccccttccttctacattttttatttttatttttatttttttgaggcaggttctttttctgttgccccggttggagtgcagtggtgcaatcatacctcactgtagccttgaactcctgggctacatgcatgagataccacttgtggccaattaaaaaaaatttttttggtagagattgggtcttgctgtgttgaccgagctggtcttgaactgttggcctcaagtgatcctccttctgtggcctcccaaagtgttggcattatatgcgtgaggcactttcttcttttgtatatacatgaatgtgtagcagccacacaaaccttacgcctgcccaaatgatgactagctcacagggccaactgataaaccatatggctgaatagtgttaccctgttcctaaaactcaggcagtctgggggaccatcatgtttccttaagactagtctttagtctaaccagcaagcctgtactcactaatttgggcaaaggtcttaagttagggtttctgaagagtcatcggtgtgtcagaatcccagagttctaagaaactttagaaatcatccactgacttattttgtagatgaggaaacaggtcccctggggttaagtggctggcacactagttgggcaaatttgggtaagttgtttaacttctctaagcttccttatgtgaaatagggtggcagtatgacctactttgtggggttttggagatgacctaaatgagggactgtgtagagcacaatgtcaggcaggaagtcctccactgatactggctgcctctgtcaccatctgacttcctcctttcccatttggatgctttttctttctctctttttgcctaattgctctagcttgctgcctatattatcatttgagctctgttgctcaggctggagtgcagtgatgcaatcacagctcattgtaaccttgaactcctgagctcaagcgatcctcccacctcagcctccagggtagctgggactgcaggtgtgtgccaccatgactggctaatttttttttttaatgtttcttggagacagagtcttgctatgttgctcagtctggtcttgaactcctggctcaagcaatcttcccgccttgccttccaaagctttgggattataggtatgagcctccatgcccaaccctggaatcctaattcttgacccaatgctcatatcatcacccttgcctgtaccatccagtgatatgggctaaaagttcctggataaccaaaattcactaataatccacctcagaagtgtggaggactctgtctccagttgcaaaaaggcaggcttctttcacatttgattccacatatactgaaacacctcttatatataagatgctatgctaggggttgcaaaggtgagggagacatggcattaggatttaagtgtagcttgtattattttgatagaatttacagcctatcagctgcctctgcagcagaatagctgtgaggctttgagaaattcacagaacctctctatgatgcaatttcttatctgtaatgtgcagatgctatgtgacaatgtaaagcaatttaagcctaatgccaggctaaagtagctgcttaataaatgtaagctttgattgatattgggactatcaatattgttaattcatctggagctggaaagatggatgggatttcatccgtacagagatggtggttgaagccatggaattaggagattcccatagggagagggagtagaaaaacagaagatcccagtaaggatcctgtgggaggagcattatagcaaagatctggagacagatggtttggattcaaatcccagctctcttatttactagctgtgtgatgttggacaaataacataacctgtgccccagttttcttatctgtaagatgaggataccccatgagcatactgatgatgcaacagattaatacatgtaaggtgcatagtgagttttcaaaaatgttggttatcattattttctttgtataaatttatgggatacaagtgtaattttgttacacgcatagatttcatagtggtgaagtcagggcttttagagtatccaccatccaaatgatgtacattgtaaccattaggtaacttcttattttccactgtccttctactccctcagccttcccagtcttcatcgtctatcattctactctctatgtccatgtgtccacattatttagctcccactgataaacaagaacatgaggcatttgtcttttggtgtttgagttatttcacttaatataatgacctctaaaattaataataaaattatcatttattttcttgtcacaggaaaatgataaaggagggagaagaaagaatagcaagagaaaaaggaaaaaagtcagggcagggctagtttgcagaagttatcaagaaggagaagacatcaattagaaaacaaaacttgccaagaggaagatgaacaacgtattagagaccgggtgcggtggctcatgcctgtaatcctagcactttggcaggctgaggcgggtggatcacctgaggtcaggagttcgagaccagccagggcaacatggtgaaaccccatctctactaaaaatacaaaaattagccaggtgtggtgatgtgtgcctgtaatcccagctactcaggaggctgaggcaggagaatcacttgaacccgggaggcagaggtttcagtgagtcaagattgcgccactgcactccaacctgggtgacagagtgagattctgtctcaaaaaacaaaacaaaacaaacaaacaaaacaaacaaaaaaccaagctactagattggataggaacattttagggatattcgagagcatactttgaatagggtagtcaggaaggaaaccacactccaaagggaaaaggtgagagtgttcagagcagaagaaagaggaggagaaaataaccaattgttgaaccaagtggtccctgactgggggataggttaagcctcagtcattgttacagtcacacatacctggaagaagcaatggtccctgcatttctgtggtacgggtatcccacgccagccagccctggaagctctctactgtgccgtaagccaaccacctttcctagctcaagaaatcccatgagaattgaagtatgtatcttaggtcagctgactcatgaaattgctatcagaaaagcaaactgcttcccctctttcgccatcagactcatggttctgcttttcgtttatttgctgtaccttttctgcctagctattgttgatcacctttgggatgattgagttggtaaaccctaacgaggaaatgccctgaaagttacatcacattgtctgaggattaggaagtgcctttggggccaaaataaatcttaaataagcctgtggctttgaggtgagtaaaccagattttagggtgtctgtgttggtatctgaagtttccagaggagtcattttaacatatctttctcttcccccagtagatgatacttactggttatgattgctgagccataagaagttaagagtcccaaagtctcatagaaggtaatacattatttggttatttggaccaaccctaaccagtcacaggacttgggagaaaaagtctgtaaatctacccttcctccagcaaatatttatttatttatttatgtgggtcttgctctgttacccaggctggagtgccgtggcacaatcatagctcactgcaacctcaaactcctgggctccagcgatcctcccacctcagtcctctgaatcgttaggactacaggtgcatgccaccacgcctggctaattttttttagtttttatttttttttttgaagagagacagggcctcgctttgtagcccaggcttgtcttgaatttctgggctcaagcaatccttctgcctcagtctcccagtgttgagattaccggtgtgagccactgcacccggctcccctgcttaaaactcttctgaagctcttcattagacttaaaacaccagacttcctactgaagcagtgttgttgtctggggttcatcctctcatgccaagtaaatcaaggatgcggatgcacaagaagtgaatttaaggccgagcactgtggctcacccttgtaatcccagcactttgggaggctgagacgggcggatcacctgaggtcaggagttcaagaccagccaagccaacatggtgaaaccctgtctgtactaaaaatacaaaaattagctgggcatggtggcgcatgcctgtaatcccagctactcggaaggctgaagcgggagaattgtttgaacccgggaggcagaggttgccgtgagcgaagattgcgccagttccttccagcctgggtgacagagtgagacttcatctaaaaaaaaaaaaaaaaaagtgagtttcagagcagaagtttaacaggcaagagaagagaaaaaagagaaaagctctatcctgcagagagagaggggctcccaagtgagtcttctggtctcgtggtgaaatacatggggttttatagccgagcttgaggaggagctgtctgatttacacaggaaccgagagattggtcggactgggtgtgctgtttgcatagcacgcaaagaagctggccgccccatcctcatcttttactatgcagatggggtctctacctggctggcactatgttgcctgcttttttactgcacacgtggtgataaagaaaagggaacatggtgaaaccccgtctctactaaaaatacaaaaaattagccgggcgcggtggcgggcgcctgtagtcccagctactcgggaggctgaggcaggagaatggcgtgaacccggaaggcggggcttgcagtgacccgagatagcgccactgcagtctggcctgggcgaaagagcgagactctgtctcaaaaaaaaaaaaaaaaaaaaaaaagggaagagggaacctccatgttgaacatgcctgcccccaggaagccttttcctattggcacagccgctgcatttacctttgcaaacttccagcttgcttatttatgtttgtagctcgattttgcagactgctctttgtcgtggtggtgatgatgatgatggtgataataacggttgtggtggtgatggtggtaatcatggtagtggcaggagtgatggtggagctataggtggtggtggtgacgatgaaggaagggatgatggtgatgatgacgatggttgcgatgatggtgaagatgatgaaagtgacggtgatggtagtagcgatggtgatggttacattatggtgatattttcagagatggtggtgatgatggtgattgaaggtgacagctgcagtgaaggtgattgttgtggtgatggtgacgaaggctgtgatagcagtggtgataatgatggggtgaaaatagcaaaggtggtggttatattggtagtggaggtaaagacgaaaagaaatgattttggggctgctttttgttaacagggaagccttactgaggactctcttaccctcaccagttgcctgaataatatctttttagctcttgtatcactagatacaacaggaacaaaaaggaacaaacaaacaggcaaacaaacaaaaaaaccactgcaagaaagtagccctggtggcaactgaagacacggtcatggattaaatcatttagggagagattatagagtggaaaaagaaccctgagtaattcatttaaaaactcaggcaatgttaatttgtgcaaaggcaatagaaaaaaattaaaaaaaataaaggaatggagaggcagctaatagaggagacaggacgagaatggccagagagatgaggggtgggggtgggaaatgaatggagtatggtattatggaggtaaaggaaagagatcacactgaattaagactgaaagacacccacaggagagagctgcaagggggttgtttgtattcttagcatgaacaattacagtagtgaaggtggtggtggtggtgatgatgctgatgctgatgatagcggttgtggtggtggttgttatatataaagtttcggtgacgtgaaagaaatagcacttgaatataaaattttccttttaattctcagcaaggcaagttacttcaatatagaagggtgtgcccttacagatggaacagtggcgagcgcacattcggacatgggaggggaaggggttcttatccctgactcaggtggcccctgctgctgtgtcgttcccctattggctaggattagaccgcgcaggctaaactaatgccgattggctaatttaaagagaatgacggggtgagtgctttggcgggagtcagggcagagcaggtagcaggtaatcggaatgagttagggtggagcaggtgatcagaatgagtcagggtggagtaggtaatcgaaaaagctgctttacgaggaagttaagtttaaaagtagaaggcaaagaattgaacatactgacatattaattctttgaaaataaatttagaactcatatctaacatggtgatgatgatgatgataataacggttgtggtggtgatgatgatggtgatagaatggttgcagtggtgatggtggtcatcatggtagtggcagtagcgatggtggtggtagaggtcgtggtggtgatgacggaagtgatgatggtggtgatgatgatggttgcgatggggctgaaggtgacgaaagtgacgacggtggtagtagcaatggtggtggtaacatcacagtgatgttttcagagatggtggtgatgatggtgattgatggtgacagttgtagtgaaggtgactgttgtgatggtgatgaaggctgtgatagcagtggtgatgaagatgggagtgaaaatagtggcggtggtggttatgttgatagtggaggtaaagatggtggtgatgccaataatggtagggaaggtggtggaggttgttgttataatggttcaagccagaattatgtggattgaggaaaaagcgcgaggggaagaagtggagacagcaagtgaagtcacctgtaaagacagttggagaaaaaagtatgagcaaagcaagatgatcaagagacctccctgggtgtttggagcatggtggaattagctggctattgggattgtcaaggccatgaacgtacgtagtaggtttgttgggctctcaacatcctactgtcccagcatgcatgcagtgaggcttcctgatctttctccctagtgatcgtctaggggtggggttgtagaggcaagagttgatcaagagagacaggtggtgctacctaatggtcaggccaaagtggttcacatagtttggatgttgttccctctaactctcatcttgaaatgtaatccccagtgttggaggtgcggcctggtgggaggtgattggattatgggggtggatttttgatggctggtttagtgccatttcctcggtgctgtcctcatgatagtgagtgagttctcatgagatctggttgtttaaaagtgtgtgactcctcccctcttctctcttgctcctgccctcaccatgagacacctactttcccttcaccttctgctatgattggaagcttcccaggccttcccagaaaccaagcagatgtcagcttcctgtaaagcctgcggaaccacgggccagttaaaacacttctttatcaattacccagccttggatattcctttgtaacaatgcaagaatggcttaactcagtagttatgctattacagaatgttggctgcagagtcagaatccctgggttcaaatcctggctctgccactgattagctgtgtgactttgggaaagttactcaacctctcttttctgcaggcatctctgatctgggataactgcaatagtctcgtaactcgttgtccttctgtcccatcctccaccgtgcagtcaggacagttttctgaaagatgattctgggcccatcacacctctgcctcacaaccctgtgaatatttcacaggctaaatgcacttacttagtaggtgcataaatctcaccccactctggtcccactccacttctccagcctcatttcctacccttctgcttcagcctttccaccttccctgatacattttctgtttccctaaactccacattctatttgtagcctttcatgcctttgtacatgtgattctctcaacctggaatgcccccccatttttttttttttttgagacaaagtctcactctgtcacccaggctggagtacagtgacatgatcttggctcactgcaatctccgctccccgggttcaagcaattctcctgccttagcctcctgagtaactgggactataggtacccgccaccatgcctggctaatttttgtatttttagtagagatggaatttcctcacgttggtcaggctggtctcaaactcctggtctcaagtgatctgcctgccttggcctcccaaagtgctgggattacaggtgtgacccactgtgccccacctggaatgccctttctttttctttcttgccactctactcctggccacgtccttcaagtggcattcttttgcatgtccttccatgataaactcttgtgaaaggaaaataaagtctcaggactccaattcaggaataaaattaagctgaaagcggagtcaagcagacagctacagataaaaggccagatatcttcacaggtagctactgtatattcattttatcttacataaagtgccgatttactgagcacaaggtgaatacatcattgactagtcccccacctgctccttttatctctggcaacacattggttcagtaatgtgaccaaactctccctctttcccctccagtctgcttttcccccttaaatattgaagccctcaaaattatctttggagaaacaaacagatgatagtatgtttttctgtgttcctttcttccaggcatgttcttgaccctagcaaaataagcttctaaattgattgagacctgtctcagttacttttggtttatactctccactgtgcccttccctgcctctaagatagagttagcttctctcatttctctgttcatatcctatttcatcaaatctaaagcattattaattttaaggtacaccattggccgggtgcggtggctcatgactgtaatcccagcactttgggaggctgaggtgggcggatcacttgaggccaggagtttgagaccagcctggccaacatggcgaaaccccatctctactaaaagtacaaaaaagtagccaggcgtggtggcacgcacctgtaatcccaactactcaggaggctgaggcagaaggatcgtttgaactcaggaggctgaggttgcagtgagccaagatggtgccactgtactccagcctgggtgacagagtgagactccacctcaaaaataaataaataaataaaggtacaccattattttatgtaccactacacctaaccattaaactatgatacaatgctttattattctttataaatttttattttattcttgaatgagctataatagatttatttagaaatgaatatttatcatgcatggctctgttgcatgcatacaaaagaaactagcagcgggaactaaatttgttaagatgttcttgaagcttcttcatattcagaatcttctaaattactttcagcacagtcattggtgcccatgtttcaatttccatgtttctctatgtcagtagttctcaagatgtggtccccagatcagttgcatcaatattgtctgggaatttgttagaaatgcagattcttgggcctggtgtggtggcttatgccggtagtcccagcactttgggaggtcaaggtgggcagatcacaaggtcgagagatcgagaccgtcctggccaacatggtgaaaccctgtctctactaaaaatacaaaaattaggcaggagtggtggtgggcacctgtaatcccagctactcaggaggctgaggcaggagaatcgcttgaacctgggaggtggaggttgcagtgagctgagatcacaccactacactccagcctggggacacagtgagacttcatctcaaacaaataaataaataaataaataatgcggattcttggaccatatccagacctgctgaatcagaaatgttgagatagagcccagtgagtgttttttaacagaccttccaagtaattctgatacatgcttaagtttgagaacccagctttgcatggtattgttctctggaccatcaggagtactgtgatgtaggatttattcaaagaacccatgagagagccagaggccattgctagttctctgccatcctaacattgcttagtggggcacctgagaataaatcaaatgttttccaactgtgatgacaaatgagattataattccttttcgtaaccaaattattgtggtataatattccaggggctttcttgctggaaatctaaaagtgtgttctcagttatctctgagagtttctcacaggttcacctcatagatgtccctgaatagccctttccatccttccatgcatccatccatgcatccatccatgcatctatccatttatccatccatccatccatcatcaatccatccatccatcatgcatccatgcatccatccatccatccactcacccagccatctacctttcatccgttcactcaccgacctattcttcttttcatccaccaacccatttatgcactcatccatccacttagtcacacactcaacttttcatcttgggtgatggaggttgggatgcttgtgattttggtgaggatagagattgagatgcaaattatttttggtgtgggatagaggctgggatgcacatggttttttagggggatagaggttggaatgcacatgatttttggggagttagaggttgggattcttgaggttttgggggatacaggttgggatgcatgtgatttttggggggatagagactgatatgcacatgcttttttggggggatagaggttgggatgcatgtgattttttgggggtagggtttgtaatgcacatgatttgttgggggtaagggttgggatgcacttgatttgtttgggggatgaggattagaatgcaccgaattggccaggctccgtggctcacacctgtaatcccagcactttgggaagccaaggtgggtggatcatgaggtcaggagttcaagaccagtttgggcaagatggcgaaaccctgtctctaataaaaatacaaaaaattagccaggcctggtggtgggcatctgtaatcccagctactcgggaggctgaggcaggagaatcacttgaacctgggaggcggaggttgtggtaaaccaagattgcgctgttgcactccagcctgggcaacacaagctccctcccccccgcaaaaaaaatagaatttaccgaattttgagtggagtgcagctttcataatgcacatgatttttgggtggggtttataatgcacaagatttgctggggggcagggtttaggatgcatttgatttgttggagggataagggttaaaatgtacatgattttttttttcttgggtgcagggagtgggatgcacatgatttttgaggcatagaggttgggatgcccatgactttgggggtaggggttataatgcatgtgatttcttacagaggggttactcctagaagaagagaactgaagaaggataggacagaggaaggagctgaacaaggaggtagtcttagcaagagtctagcctcagcctaatcccatggggagctctggactgtgcaccatggagttgatccatcttgaggcagggcccttatacaaggcccttatgtcaatcaatcattggctgtggctgccctgggcgtgggtgcaagccaaacctcacaggtaaatgaatgaatgcaaccatgaagagcaactgggtggagctccaggagcatcaactgcattgctcaaacctttatctgggtcatgctcacccactgcctcaaacgttgctacacagagtatgaatgtcacttcctcttcattttaaagtgttcaaaataacaattctcattagccgtgttgcaacatcacatgataaatatgggggtgagcagcttccacatgattctttttttcaatttctgttgttatttctcattgaaaaaataagaattgtatatattgatggggtactatgtaatgtgttgatatatgtatacatgtggaatgattttaccaagtgaattaacacattcattacttcacatacttatatattttgttgtagtgagaatattaaataagtaaatatatatatatatatatatatatattttttttttagagacagggtcttgctctgttgcccaggttggagtgcagtgatgtgatcatagctcactgcagcctcgaactcctgggatcaagcggtcctcttgctccagcctcctgagtagctgggactacaggggcatgccaccatgcctggcatatatatatatatatatatatatatatattggagatggggtcttgccatgttgcctaggctggtctccaactccagagctcaagccctcctcccacctcggcttcccaaagtgctgggaatacaggcatgagtgactgcgcctggccaaaatgtattttttaaaacaattttcaaatatacaatgaattattaactattggcaccttgctgggcaatagatcttgaaaactcattcctcctgtttaactggaacttcatattctttggtgcaagtaatgcttaattctttttttatattttgagacggagtctcactctgtcaccctggctggagtgcagtggtgcgattctcagctcactgcatcctctgcctcccagtttcaagcgcctctcctgcctcagcctcctgagtagctgggattacaggtgcccgctaccatgcccagctaatttttgtatttttaatagagacggggtttcaccatgttggccaggctggtctcgaactcctgacctctagtgatccacccacctcggcttcctaaagtgctgggattacaggtgtgagccatcgtgcctggcagtaatgtttaattctcgacaggctcaaagatgatcatggcagccagcttggtagtcaggttgaatttatttaagtgtcgatccctacagagaggatgctgttgatccctcacccagatcccgttttctggtttattttctagaactatttccatgagaaataaaatcaaattttattaatgtcaagaaagtatttctttgccctaaggaacaaatggattgttctgtagggactcatcccccagctgttgtatattagttgctatcagtcacggctgtctgatatatcaacctgaaataatcaaaagcaccagattccagttttaaagagcttattcaagagaaaatccatgaacagccactctgggatgcacaaactctagagaaatggagtcaatgctctgaagttagaagctaagttcttgcttgtataggaagacaaagaaatttaacaggattacattttctatacaaggctggtttatgagttataacaaattaattagttgcagttttttttctgtgtgatttgttttctttttgttgtagctgcttttcattttctttccaatttaaaagtgtgtatttaacattccctctaaaggcagtgtaatagccatgaagtccttatgtgagaaagggaaaagggaagttattttttactgaaagtcaacagcagagaaggaagggtcttccctggctcttcaaccacctgtaacattttacaaaacagtgccagtaaaggaaaaggtttaatctgtaatcagagaaacaaaagctatggcttcctgggtttgagctgcctgttacgtgactcgggccctgtaattcacattcctttaaggccctaaataatttaattgagttccaacagcttaattttctttttatttggagatggattctcactgtcacccaggctggagtgcagtggtgtgatcatggctcactgaagccttgaacccctggactcaaatcgatcctcccaccttagcctcctgagtagctgggacaacaggcatatgccactatgcctaattaaatttttttttttttttttgtagagacagagaccttggtacgtggcccaggctggcctacaactcctggcctcaagtgatcctcccacctaggcctcccaaaatgtcggtattacaggcatgaaccaactgtgtccagccccaatagcttaaattttgaatgactaattttatgcctccttcagataattgctgcctcagctgaacaggagttgctctgggaggttatgatcccccacccttaggaggcatcttgcagccaatggctatccaagatgggggtacaaaatgccagctcctttcctcaaagtagaatgggaccagttctgtgtctcatactccagagctccctatgagattaggttgaagcttgactccagctgagcccacatctttgttcaactccttcctttccttcctaccctgctttccttactccctctctcccaagagcaccccagcaaatcatgaggacctaccctcctcccagggattgcgacctaaccaaattcctcccttatttggttatgtcatcaacacaaaagaagaaataattcaagtttcctaacactttctggttttatcctgagatgagatttaaaaatataatgcttgatttacagtaagacacaaataagatccccattatcaatattactttattgatgatgatgataataatgatgattgagtcctatttcagagtgcttaatttctttttgaaattgagatagagtctttctatattgcccaggctggtcttgcacttctggcctcaagtgatcctcctgccttggcctcccaaagcactgggattacaggtgtgagccaccgcgcccagctcagagggcttagtctttacattatagtgccatcttctggtaagattaaagaaaaagaaatccaaagtagcttcaaatgctgggctttaagaagctgggttgaagtatggatgaaggtctaaattttccgggtatgaggagttaaggcaaatcctacagagatattaacttgttcttttttacatcaccttaaatctattattgtatctttattattctgggacattcaggcccaaagatactcattaagtcagtaagctaaatttagtgacaagtgcatgagaattagagttaggaagcctgatcatgatatttattcactcatgcatttgtgaacccatccatccatccgacaaacgtttaagatatgtggtctctgtgctcggtgatttcatgtcaggttgattcattttactcagtgtttactttctcacatttaaaatggggttaacaatggaaaacagcgtggcgattcctcaaagacctaaaaacagaaatactatttggcccagcaatctcgttactgagtatctacccaaagaaatataaatcattctatcataaagacacatgcgcatgtaagttcgttgcagcattactcacaatagcaaagatgcggaactaacctaaatgcccatcaatagcaggcgatataaagaaaatgtacatgcacaccatagaacactatgcagatgtaaaaaagaatcagctcatgttatttgcagggacatggatgcactggaggccattatccttagcaaactaacacaggaacagcagaccaaatactggatgttctcacttctttttttttgaaacggagtctagctctattgcccaggctggattgcaatggtgcgatctcggctcactgcaacatctgcttcccaggttcaagtgattctcctgcatcaccctcccgggtagctgggattacaggcgcctgccatcatgcccggctaatttttgtatttttaatagagacggggtttcaccatgttggccaggctggtcttgaactcctgacctcaggtgatccacctgcctcagcctcccaaagtgctgggattacaggcgtgagccaccatgcttggccactgactcctttcttactcctggctttgttgagttatagttgacaaataaaaattgtatatatttaaggtgtacaacttgatgttttgatatacatacagtgaaataatgaagcaattagcacatccatcgcctcacatatttgcttttttttttttggtggtaagaacacgtaagacctaccctcttagcacatttcaagtacataatatgttcctgttaactacagtcaccatgctgtacattagatctccaaaacttatttatctgaaataactgaacctttgtacattttgttttttaaatgatacatttcttttatttttatttttagagacagtgtcttgctatgtggcccaggctggtcatctggaactcctggactcaagcgatcctcctgccttggcctcccaaagtgtgctgtgattacatgcatgagccaccccgcccggcccaacttctttgtaagaacatttagcttaaaacacagataaattgtactgcataaaggtattttctttctttatatccttattctataagctatttttcatttttttttttgagatggagttttgctcttgttgcacaggctggagtgcaatggcaagaccttgggtcactgcaccctccacctcctgggttcaagcaattctcctgcctcagcctcccgaatagctgggattacaggcgcatgccaccatgcccagctaatttttgtattactagtagagactgggggtttcatcatgttggccaggctggtctcgaactcctgacctcaagtgatccaccagcgtcggcctccaaagtcttgggattgcaggcgtaagccaccgcgcccggtcttttcatatttttaaaacctttttaaatgtgagtaatgtgttgcactgcaacattgtgacagttacaacatcactaggtgataagaaattttcagctccattataaccttatgggatcacaactgtgtatgtgtttcgtggttgaccaaaaccttgttatgtggtgcatgactgcacatgtgcttgatatataaagaataccagggaactagtgacagtggttgtttcaggggaggaaaatttaggaatagagtgagcctcccgtttgaacttttcccataggtatgtactatgtatactacataataaatagtttttaaaaagtcagatctatgtcttagattcacacatcttatttttagtgagaagggcaagctgtagaagaaacaaaaatacatcgtcctatttttagaataaagacagttagttgacccgtgaacaccaagggtttgaactgtggctatccccttataggtagatttttttctacctttgtcctccttgggacagcaagacaaacccctccctttcctcagcctactcagggtgaagctgacgatgaagacgtttatttatgatctttacgatcacttccacgtaacgaagagtaaatatattttctcttcttcatgattttcttaataacactttcttttctctgagcttagtttattttaagaatatggcatataatatacaaaatatgtgttaactaactttatgttattggtaaagcttctggttaacagtagtctattagtaggtaggttttgggggagtcaaaagaagtgaattttccactgcacagggtggcgccccaactcccgttgcctaagggtcagccgtataaaaatatacaaaaacaatcttaagtatgggtatatttttgtaggggattggattaagcccatggataaaggtggaaggggttggggaaaaggaaggagaaaagggtaagttaaatattgagcatccctaaagagacccggggaggggtcgggtgtgcccctctcaacccttgaagcccaggtcccctcatcccgccttccgaatgcaagttcagctcccattcccaccccaagcacaagccccgccccatttttgcccctgaggcgcacgacccgcccctactaccaccctgcaaaccaaggccccgcccactccgccattggggtgcaagccccgcccatcagccatcggagggcaagccacactccaccccgcccccgcgcacaggccccgccccacttttgccccgggacctaagccccacccctatccctgtctctcggacataggctccgcccccagcaccaccctccatgctctgtgggaccccactccagagcctaacctcatcccccgggtaagaatactagaatttctccttggaggctaaagaagacgttagtttctctgccgccgcctaaggctaccctggccacaacagcctgagccacagccacttccgttcccggcggccccgagaccggaagcggaagtgcgcgcggcggcggccgacggcggctgagctgtgctgcgcggcgcggcgcggtgcggcacggcacggtgggagtgtctccggctggcttgcaggtgtggcccggcccctcgggagggcggggagggcggggagggctcggctggcgcggggagggactggagggcctagaacagctccgcctgtgtgaggggtttcctccctgcgatcagccggtggccggcgtgaggcccacacagtcagggcctcgcatctgggcgcccgccgcccggtctctcgctctcaggtaccccccgtccgggcagacagggctgtcatcctgtcaaaagggaaatcccaaacagtccaggtcccacagctcagaaatgtggtgacaccggccccagctctcacctgtccttcccaatttttagggaaagtgcataaagacggccctaccttgcctacagtatgcaagataactgcgaattagtaattcacgttttatttgatatgatacttaatattatctagctttgcaactggaaagtgaggtctgggtccacatgtgcaaactggtttaattgattggccaaatttacttaaaaaattgaatgcatcctccattaaggaatgaattagatgacgagagatttcttttggagactgacaatttgaagtcttttagcttaatatctgttagcttggctttgcatctcttccttttccataactttttctttcttcttttttttctttctcataagaaagcttttggccaggcttggtggctcactcctataatcccagcactttgggaggccgaggcgggtggatcacctgaggtcaggagtttgagaccagcctggccaacatggtgaaaccctgtctttactaaaaatacacaaattagccgagcgtagtggtgggcgcctgtaatcccaactactcgggaggctgaggcaggagaatcgcttgaaccccagaggcggaggttgcagtgagctgagattgtgccactgcactccagcctgggtgacagagcaagactccatctcaaaaacaaaaacaacaacaaaaggaggagttcttaattttttttgtttttgtttttctttattttctatgtttgagacgacttttacttctgctgtgggcatcaagtttctcactgttaggttaagaaaagccgtttctcagttatttcacaaatattattatcaagaaaacctaagactgttattcagatcttttcaagttggctccagtccttcccccaagcatgtgaatcacagagcttcaaaactaatggaacttcagggaaaagacgatataaactttgttaatactggaaattcaaattgagttggccataagtgggatgtcttttttaataatggggttaaagctcgtgtctactgagaaatcaggaaaaaattaactccagaggaaaatcatgcatcagatttcagttttacgagtgaggtgtttgtttccacaaagaatatatgcgcttgccttgcctttttaaaaagaattaatattgtttcttaaaggtacctgaaacttgtgtgattatgtcttatgaaagacaggcactttaagttattcttatatttgatttttatggtgtcatattgtcttttttttttttttttttgagacagagtctcacttcatcacccaggctggagtgcagtggcacaatctcggctcactgcagcttctgcctcctgggttcaagcaattctcgtgcctcagcttcccaggcagctgtgattataggcgcccgccaccatgcccggctaatttttgtatttttagtagagacggggtttcaccatgttggccaggctggtctggaactcctgacctcaggtgatccacccgcctcggcctcccaaagtgctgggattataggcgtgagcaaccatacctggcctcatactgtgttttgtgtgtgcgtgggcatattccttcttaggctagctatactgagtcattcttgaggagtgttgattatttggcatattttcactggggtgccctcaatgaattggaccctgtacatggggaaacagtgggactgaaatagttacagtgcttgcccctgtggaggctttattctagctaataatattggtaaattaatagtgccaaaggcaatatgagaacgtggaacaggagaacttggggaggatgtcaggaaacacatctgaaaaggaacaaatgtttgaaccttcaagatgagttgtacgtagctaaacaaggggtctagctgtggagtggggtagcggaggaaacttgagagaacattccagatgtacagtctttcaggcagtacgaagcctgctgtgttccaggagctgagaacaggtagagaaagctaaagtagagaaaataaagtactgaatggatgagccaggtgagagagggaggcaggtccctgaagatcatggttagcattggatcttctttttatttattttttttctttcagacagagtcttgctctgtcacccaggctggagtgcagtgtgggatctgggctcactgcagcctccacctcccgggttccagcgattttctggcctcagcttcctgagtagctgggattacaggtgtgtgccaccatgcccagctaatttttgtattttaagtagagatggggtttcaccatgttggccaggctggtcttgaactcctgaccccaagtgatccacctgcctcggccttccaaagtgctgggattataggcatgagccaccgtgcttgacctggaccttattctttttttttttttcttgacatggagtcttagtctgttgcccaggctgcaatgccgtggcacgatctcagttcactgtaacctccgcctcctgggttcaagcaactctactgcctcagcctccctcccgagcagctgggattacaggcgtttgccaccatgcccagctaatttttgtatttttagtagagatggggtttcaccatattggccaggctggtttcaaattcctgacctcaagtgatccacccaccttggcctccagcctgagcaacagagtgagactcaaaaaaaaaggtttacatcacagttggagagagagaggccaaaatcgtttaagaaataaatatcaaatcacaccttcatatgggcagtggaggaaaagtagaagatcttagaagtattttgagggaagctagaagttaaaatgttcctttgatgacatgggaagagtcagtagcagtcactagaggctgttgtttgaaaggtgccttgggggccaacatgttgcttatggagataaatgtcctgtaagggttttgattgtgaccactctgctggagatcccccaaaatgctctgcttccgtcctcaccccttcttttacctcagtgtctcctttattgcagggagaacaccgactgagacctcaaaccctggctccagtgtcatggtgaggaaactgggggctcctgtggctgaaggggtggatatgtaggataactatgtcctctgggccctgtcttctctctcgccacttccgtccccaactgaggaagaaagggaagggtgagtgaggagcatcctcatccctgccctaggggacctagggacttccttctgtgcctgacctctagaggtggcatggaagaagagtcccacagcagaccctggggctctgagcggagctcctccagggccatccttgtcatccctggtgagacctattgaaaacacatgtggccatagaaatataaattcagcttaaattaattaagattcagtacatttagccgggcatggttgtgtgtgcctggaatcgcagctacttgggaggttgaggtgggaggatagcttgagcccaggagattgaggctgcattgagctaggattgtgaccctgcactccagcctaagctacagagtaaaaccttgtctctaaaaaaaaaaaaaaaaaaaaaaaaattaaaaagtttaagcgctcagtttctcagtcgccccagtcacattgcccaagtgctcaacagccacatgtgctggtagcccctttctggaaagcacaggcatggaacattcccatcatcagagagtgatgtctgttggacagcactgctctgaagaattctgcaattaaaaggattctcagatgaggccgggcgtggtggctcatgcctgtaatcccagcactttgggaggccgaggcgggcagatcacttgaggctgggagttcaagaccagcctggccaacatggtgaaactctgtctctactaaaaatacaaaaagttagctgggtgtgtggcacgtgcctgtaatcccagctacttgggaggctgaggtaggaaaatcgcttgaacccaggaggtgaaggttgcagtgagccgagatggcgccactgcactccagcctggacgacagagcaagactgtctcaaaaaaaaaaaagaaaaaaagaaaaagactctcagatgcaatggaagtcctactttcacaagtatataattaaggacgtaagtcttgggggatcccagggacttcacagaaattaagctttcaatcccaaatttgtgatgctgtgccaatttgtaataaggagtttaggaaaaactctctaagcagggagggacaggctctgccatcacaagtcagtggagttacacagagagccataactttacactttaggatttatccaaatgttaaaagaaagtaaacatttcagcttggtggcccatgtgatctctgtcacaactattcagttctgccgttgtggcctcaaaacagccattgatgcattgtaaataaatgcacgtggctgtgtgccaagaaaacattatttacaaaaataggctttaggctggattttccatgcctgctgtgtctgaacattttctcttctccagtgataaccagtcgttctgctcagtggtgggggtggtatttgccgagccagaatgtgtgtgctgttttaggaatccgtcacctttgaggatgtggccgtggagttcatccaggagtgggcattgctggacagcgcacggaggagcctgtgcaaatacaggatgcttgaccagtgcaggaccctggcctccaggggtaaggctggcgtcacctggctccttcctgtacgcaggcactaaatgcttcttaagcgcctgccatgtgaagaagacagacgtggcttaggctttgtggcacttagcgtccacaggatgacaaagcttcatctgttgcattgacttctttccctctgtagtaaggccctgtttgggtctccttgaatttggccccaggcttctgaggtgagacagcctcagccccttggggcagaggggagggtgtttgtgggttgggtcctgagttcattagctattgggcaagatccctttgctacccatcacacttgctcagcccagagaatctgaagcccatattgaagctgaaggagagtttgagttgagaaacaagagtttgttttcccctgcaagccctctctctctcagtgcctgtgtctttcttcatgtgcaggaactccaccatgcaaacccagttgtgtctcccagctggggcaaagagcagagccaaaggcaacagaacgagggattctccgtgccacaggtgttggtgagtaccaggcaggctgtggatcccccgacccccctggttgggtggtgtgccttgggaagtgtcaagagcattttcaaaggccctttgttctgaggggacatcgaaggccattcggagtgaggtttctcaagttcctttagcttctcttctattttcactttctagccctcctctcctactttcctttggtttcagaaaaagatttgttctaatttctcttaaaaaattagagggccaggtgtggtggctcttgcatgtaatcccagcactttgggaggccgaggctggtggatcacctgaggtcaggagttcgagaccagcctggccaacatggcaaaaccccatctctaccaaaaattagccggatgtgatggtgcacacctgtaatcccagctacttgggaggctgaggcatgagaattgcttgaacctgggaggtagaagttgcagtgagccaagattgcatcactgcactccagcctgggggatagagcgagactctgtctccaaaaaacaaaacaaagcaaaaattagagctataagtcacacaccatgaaattcacccctttaaagtgtgcagttcagtggttcacaaccttgtgtaaacatcaccactacccaattccagaacattttcatcacgccaagtagaaaccctgtccccatgggcagttactccccattacccctccctcagcccctggcagccactaatctgctttctgtctctatggattgtcctatatagacatttgtatatggaaatcgtatcataagtagcctttggtatccggcttagtataatagttttgtgttgcaagtaagttagactgggtagtttataaacaatagaagtttatttgactcctggttctggaggctgggaagtctaaggctgaggggctgcatctggtaagggccttcttgcagcatcataacatggtggacgagatcatgttgcaagagaacaagagaggcccagactggtttttacagcaaggccactcttgagataactaacccccttctgaagtaatcacagggcagattcctcgtgacctaatcacctttttttttttttttttttttttttgggacagagtctcgccctgtcacccaggctggagtgcagtggtacgatctcggctcactgcaacctctgcgtcctgggttcaagcgattctcctgcctgagtctcctgagtagctgggactacaggtgcacaccaccacacccggctaatttttgtatttttagtagagatggggtttcactgtgttggtcaggctggtcgagaactcctcatctcgtggtccacccacctcagcctcacaaaatgctgggattacaggcgtgagccattgtgcccggccacctaatcaccttttaaagttccagctctcaatactgttgtatgggaattgcttccaacccatgaactgtggaggacacacttaaactacagcagtatctgtcttctttcacttagctttatgttttccagatccatccatgttgtagcatgaatcagaacttaattccttttttaaggctgaataatatacattgtatggataagctatattttgattatttgttcatcagttgatagacagttggattgtttctactttttagctattgtgaataatgttgctgtgaatgtttgtgtacaatatttcttttttcttttcttttttttttttttttttttttgagatagggtcttgttctgtcgcccaggctggagtgcagtggtgcaatcataggtcactgcagcctcagccttttgggctcaagcaatcctcccacctcagtctcttgaatagctgggaccacaggtgcatgccctcatgcctggctaattttaaatttttttctagagaccattcttcctatgttgcccaggctggtcttgaactcctgggcttgggtgatcctcccaccttggcctcccagagtggtgggattacaggcgtgcgccaccgtgcctggccttgtgtacaagatttatgtagacatgtacttaattctcttaggtatatactgaggagcagaattgctggctcatatggtaatgctatgcttaacttcttgagcaactgtcgtaccactttccaacacaggtacaccattttacattcccaccagcggagatgagagttttgatttatccacattctcgcccatacttgtcatccaattcctctttaaatttaacctttttatgtatgttctttgtctagttctttcttactcttttttctaataacatctgctttctggaaatagtctcagtcctcatagaattcttagctaggaaattgcctctcattttcccctcattcctatgactgccagagtccacacatagccctacatacagatgctgtcttccctttcaggatcttcccaagtctaaggtcagtattaaaagctgggctgggcatggtggctcatgcctgcagtcccggcactttgggtggatcacttcaggtcaggagttcgagaccagcctggcccaacatggtgaaaccctgtctctactaaaaatacaaaaattagcctgacatggtggtgcgcgcctgtaatcccagctactcaggaggttgagacactagaatcacttgaacctgggaggcggaggttgcagtgagccgagatcatgccattgtactccagcctgggcgacagagtgagactccgtctcaaaaaaaaaaaaaaaaaaaaaattagctgggcatggtggtgcatgcctgtaatcccagctacttgggaggctgaggcacaagaattgcttgaacctgggaggtggaggttgcagtgagccaagatcgcaccactgcactccagcctgggtgacagagtgagaccctatctcaaaaataaaaagtaaagaaaacatgtggctcatgcctgtaatcccagcactttgggaggctgaggtgggtggatcacaaggtcaggagttcaagaccagcctggccaagatggtgaaatcctgtctctactaaaaatacaaaaaaaattagccagacgtggtggcgggtacctgtaatcccaactacttgggaggctgaggcagagaattgcttgaactcaggaggcagaggttgcagtgagccaagattgcgccactgcactccagcctgggcgaaagagcaagactctgtctcaaaaaaaacaaaaaacaaaaaacaaaaaacatgtatgtgtgtacacacacacaaatatagatatatatatatatatatatatatatatatatatatacacacatatatattttcaattttatgccactatttctttttgaaaggagtttattttttcccaattcatttcagactggaaatctcaacttgaatatatgtattcggtattaaaatttgaatatttatattcaacattaaaagaaaaagcctatgtgtgtatagtgtgtatatatattcacatatatatgtgaatatatattttcaattaatgtcactatttctttctgaaaggagttcattttttctcccattcatttcagcctgggaatctcaacttaaacccgaagagttgccttctatgcaggatcttttggaagaagcatcctccagggacatgcaaatggtaagatgcacggggttttccccggctcccagcatgggagaagttgaggaacacgtgaggtggaaatacaggaccagagccagggagatgttagcagcatgggtgtctcttggaagggaaacagtgtctgaggggagtgcctgtgacttctgaatttgggcaaacccagactgttgctcaagactttttttttttttgagacagagtcttgttctgtcacccaggctggagtgcagtggcatgatctcggctcatttcagcctccacctcccaggatcgagtgattttcctgcttcagcctcccgagtagttgggactgcaggcgtgcaccaccacgtctggctaatttttgtattttttggtagagacagggtttcactgtgttggccaggctggtctcgaactcctggcctcaagtgatctgcctgcctcaagattctttttttctagaaggtttcctgaaggaaacattttaataaatgtgagtcagacattgagcgtgcgaaatacgacttcctcctcagcaactgtcagaaaaacccctcctggtagagaagccccattgtgaataggaggcagccctgtggtagagctggcaacacactcgacgaactccagctgtctaaacaaggcatggcttgaaaatgctgagaatatgctcccggtggggaggacccctgggcactggcacagatattggcgagctttccaccatcattcacctctttttttggtttttaaaagacagggtcttgctctgccacacaggctggaatgcagtggcatgttcatggctcactgcagcctcaaactcctgggctcaagcgatccttctacctcagcctcccgagtacctgggaccacaggcctgagtcaccatgcccagctaatttttttctttttctttctttttttttttcttagagatggggtcttgctatgttgcccaggatgatctcgaactcctggcctcatgtgttcctcccacctcagccacccaagtagctgggactacaggtgtgagccagtgggcccagccattactcacctcttgtcaggagcaagctccacctggagaaaaggctcctgatgagttgaaaggaggcaggaaatgtttctggaggagctgtaacctggatgtgggtgagagaactggcaagacagaggccactttgattggaaagaatgtgggaaagttgttgggcatccttttcttcttaggagaccagtctagatcccacactggaaggaagcccttttcagtgtggaaaaagccttccatatgagcttgtacattaatagtacaggagaaaatatacacggagtccccaccatcccccctttggccctgaatttcctccgcctcaaacaagaggaccttccaaagtttgagttcccattcctgagtattggtgaaagttagagttagggtttggttagaaggaggcacagagctcagcctcacccccaagtggggcgtattagtcccagggtcagtgagaaccccgggatccctcagtcagtgccccttcccctgtgtcatggatgggtgtcagcatcagagcgtcagggatgccccacacagtggatggggtgcagtggcctcggttttagagacccacattcaacttctttgccagggaagcttctggaacacagagaagcctcaaccctgtgcagcttggtgtgggctgcagatcagccaaaactcacaacctgcctggctgcaacagacccctgggcagctgacagccctcctcactccccaggccctcctcgcccttggtttacactcttgttttggtggagaacaccctccagtagctccttgggatcaggtgcttgggttttgagaccttgacttctgagaatgtcttatcagggctgctggattgcaggttcctcatccgatgtggtggttgcggtaagcctcattacagaacatccttttttctttcttttctttttaaatagatatggggtcttgttctgtcacctaggcaggagtgcactggcacgatcatagctccctgtagctttgaacttattagctcaagtgctcttcctgcctcagcctcctcccgagtagctgggactacaggcacgcaccactacacctggctgattttaaaaaattgttttggagacgaagtcttgctgtgttgtgcaggctcccattgcagggcattctgtgtgtcatgtagcccccagtgcttgttgaatgaaggaaggaatggataaggtgttgcagaaggcatctccagttcccatcctccacctccatgtctctcttgctcagcaggtggaccccatgtgaagaaaggagagagggagggagaatgagcaacgagggcccggtgccctctttgtttctgtgggctctctcctttcagtacagggctccagtgccctccacagaactccacacccagcccagcaagcccctccataatgggtgctgagagtggcaggcatggggctcttgttacatcagagccccaggaaacaggcggtcacagactattctgagtgggcagaggaggtccacctatggacacacgtttagagaagctgaggagttcatccctgaagacatccagcccgtgagtagtagaggtgggtttggagctaggagttgaacccagacctaaccgcagagaccacagtctcagctgtcaggttctactgcctgacgatcatacaacctgctgctgggttgatggtgctgaccctttaggtagcccttccaggccatgccaggcatcattgtgccttgtcacaatcattgagaccctgtatggtggctccgagacctccctgtcacatgggaaaaagtgctgatggccagggacagattgagtccccatggcctccctctctttggtcggctggtccagcagagggaccagtgaagaggagggtgggaaactgctcttagaagagtcccaaggaagccaggcacagggcctcaccccagaatcccagcaactccggaagctgaggtgggaggaccactggagcccaggattttgaaaccagcctgggcaatatagcaagaacccatctctgcaaaacatacaaaaattagtcatggctaggtgtggtggtgtgcacctgtagttcagctacttgggaggctaaggcgagaaaattgcttgagcccaggaattcaaggctgcagtgagccatgtgtttgcaccactgctctccagcctgggtgacggagcaggattctgtctcaaaaaaagaaaaataaaactccccaagggaggctgaggaacaggcctctccaggctcagcccttcttctgtcccaggcccaccccacagctgcctcttctgcagacacctggctccttgaggctgcagtgttgctgctttcatcctctgctgcatccgcagggcctgcactagcagtgcccatgtcttagtctgttctcaccctgctgataaagagatacccgagttgggtcatctataaaggatgcaggtttaattgactcacagttcagcatggctggggaggcctcaggaaacttacaacatggcggcaggggacgcaaacacatccttcacatggtgggcagcaaggagaagtataaacaaaagggggaaaaaccccttataaaaccatcagatcgtggccgggcgtggtggctcacacctgtaatcccagcactttgggaggccgaggcgggcggatcatgaggtcaggagatcgagaccatcctggctaacatggtgaaaccccgtctctactaaaaatacaaaaaattagccgggcgtggtggcgggcgcctgtagtcccagctacttgggaggctgaggcaggagaatggcgtgaaccccagggggcggagcttgcagtgagccgagatcgcgccactgcactccagcctgggcgacagcaagactccgtctcaaaaaaaaaaaaaaaaaaaaccatcagatcttgtgagaactcactcactatttcgagaacagcagcatgggggtaactgcctccatgattcaattacctcccaccgggtccctcccatgacatacggggattatgggaactacaattcaagatgagatttgggtggggacacagccagaccatatcagcccagtacatatttgttcgacaaataggcagaacgcctaaaaacagtttctttaagttgagtgacctgtgtcaaaatgattctgatggaaacatttgtctcaaaatgtacccgtgggattttgatttatgacacagagaggccaatgtcattggaaaattttgattacttgtatttcctgggaggacagggcacaccatgccacacaggtccacacagggaagcaccaaggtcagcctggaggcagaaaggagcgaggggatagcccaggccagagcctttcttggagtttccacagggtaaaccactcaggatttgtcagtttgaataattttagtggaccttgggggataggtgctgtccctggttgatttagggcaggggaaatattggctgggtgagagtgagataaggagctggtacggcatgtgggctgtgggtcacgggatttggagatgaagttggcaggcagtttggccctgtgaatgatggatgccctgtggacaaggacagcattcctgttcagaaccaagatctcccgaccttgctttcttttttggtttttgggtgacttaaacagcagaaacttattttctcacccttatggaggctggaagcccaagatcaaggtggcggcagggctgggttctcctgaggactctctccttggcttgcaggtggccaccctcctgctgcctcttcacacggccatccctctgtgccacacctttctatagtgaaatgtctcatagcctcttcaggggctctgtcctaacctcaggtctgtctttgtatctgcagtgtgttcaagcctcgagaccctcggtggtagctggtgactgccgtaggtggggagtagttactaggtctgaggctaccagatgtcagacctgtgtaccctgactttttttttaagacacaatctcgctctgtcgtccaggctggagtgcagtgttgtgatctcagctcactgcaacttctgcctcccaggttcaagtgattctcatgcttcagcctcctaaacagctgggagcttagatgtacactaccacacttggctaatttttgtatttttagtagagatgggtgtattagtctgtgttcacactgctgataaagacatacccgagactgggcaatttacaaaagagaaaggtttaattggacttacagttccatgtggccagggaagcctcacaatcatggcagaaggcaaggaggaacaagtcacgtcttacatggatggcagcaagtaaagagaccttgtgcagggaaactccccttataataaccatcagatctcgtgagacttactcattatcacgagaacaatcatgggaaagacctgtccccatgaatcagttacctcccactgggtccctcccacaacacgtgggaatccaagatgagattttgatggggacagagccaaaccatatcaatggggcttcgccatgttggccaggctgctcttgaactcctggcctcaagcaattcttcacctcagcctcccaaagtgctgggattatgggcatgagccactgcacccatccccatttgccttgacttctggcagccctaagccccaaaccaaaggtctctcgggctgagaacagctgtggtgccaactctgtcctgctcagcaccctcttgtcttttgccaggggccggggctgttcctgaggatgcagctggtgccctccatagaagagagggagacaccattgactcgagaggaccggccagctctccaggagccgccttggtctctgggatgcacggtaagcctgggagaggttcactgtgatggcaccaggtgcagtcaggaaggcctggggtgtgggttgtctgtaaattgggggaggggagggaaaggagggtgtttggggcctgtaggaggcccaggctgtgggcttggggtggtggagtctgtttctgtgttgaatatacttgtccccagggtgatggcgggctccagggcgggtcctgggggagggtctggttgttggactgtaggccctgcctttcctggtccagccttttttcttcctgtccttccaccccagccccactgcttccataacctcgaaactgacaggaactggcaggtcctatgacctgagggctgggcaagggagcatccaggctcagggaagtgaggacctcttggctcagggccctgcgtgtccttaccaaggcagagagagaatgggagagagatgccgtaaggcaagggtccctaacccccaggccgtggaccagtactagcccctagcttgttaggaaccaggctgcagagcaggaggtgagcggcgagcatccatgcctgagctccgcctcctgtcggatcagcagcagctgatcctattgtgaactgtgcatgcgagggatctaggctgcaggctccttatgagaatctaactaatgcctgataattgaggtggaacagtttcatgctaaaaccatacccctaccctgctttgtggaaaaattgtcttccatgaaactggtccctggtgccaaaaaggttggtgactgctgctgtaaggcacgtcctgagccctgcatgaggagaaaaggcctcttcccactcgtccctgccctgttccctcccccgagggacctgctgcatgtaccccccaacctcccatccaccaccaagtcctgctagcgttatttccaaaatgtaacccacctccagctgcctctcctgtccctgctgctgccatcctgcccagagccaccgttagttctcctggactccagttctgctcctgacaggcacctgggctccaccctggacacagaggccagagggatcccttagaagtgcaagtcaggtcagacgtgtttcctgagcgagcagctgccagcagagaagagaccacatcctactccaaggagaggtcttcctcccagaaaaactcactgactgcctgctccgcattcacgcaggtccacctccaaactccatcttccctccacccctcaacctcctggccatccactccccacttttttcccagcttttccctgacttctggagcctccttggagggtgccaccttccccagcccctgcctgggtgccctctctccaggccattttggatcacagtgattagctttgtatttaaggattgggtaaatcctgacaaggtaaatgggtctctctcttcttttattaatatgttccccaaagcaggatcaaatatgcacgttcatttggggtgagcaggtgtgagtggccccctcagcttcttgactctaatctgtgacccctgtcactctgtccagggactgaaggccgctatgcagattcagagggtggtgataccagtgcctactctgggccaccgcaacccatgggtggccagggattctggtgagtgagtgctgcgtggaacacgtggccagagggccctgctgtccttgtgttctgtccaggaacttgtatcctatcctgcctgcatttcctctgactgcaggcactgccgtggcaccatagagaggatacagaaggcctctctcattatttgtgtgtttaagtgggagggcacttccagtgacagatctttaagaaagagagggctcactcaaccacagcaaaggccagacctctctttgggcaacatgaaattcttgactacacgataatgttgattttgaaaaattatgattgaatttactagaaatggcctgtgttttaactgtgtttttataaatgaggttcaggccggttgcagtggctcatgcctttaatcccagtgctttgcaaggcctaggcgggaggattgcttgaggccaggagttcaagaccagcttgggtaacatggtgagacccctatttctaaaaaaaaaaaaaaaaaaaaaattagctgtgcatggtgcctctcaagtcccagctacttaagaggctgaggcaggaggatcgcttgagcccaggaggtcagggctgatgtgaactacagtcgctttattgcactttgcagcctgggtgacagaatgagtccctgtctctaaagaaataggttcaaagccacttctcctgagaagtggggaagaaattaattctagaagacaaataacattttaactttaacagtaaggtgtttgttttcttctagttggccttctagtaagaataataagctttgtttcttttttttttttttttttttgagacggagtctcactctttcgcccaagctggactgcagtggcactatcccggctcactgcaagctccgcctcttgggttcatgccattctcctgcctcagcctcccgagtagctgggattacaggcgcccaccaccacgcccggctaattttttgtatttttagtagagacggggtttcaccgtgttagccaggatggtctcgatctcctgacctcgtgatccgcccgcctcggcctcccaaagtgctgggattacaggcgtgagccaccgcgcccggccataaactttgtttcttaaaagtgccatccactcttgtgtctggaatctctgttttcttcttgacagggaacaattcttagatctaagtcttgtgttgctcttcagtatatttttggtaagtcttctgggccaggctctattttgttacttcttctttttttattttattttaattgagacagcatctcgctctgtcacctgggctggagtgcagtggcacgatctcggctcactgcaacctctgcctcccgggttcaagcgattttcctgcctcagcctcccgagtagctgggattacaggggtgcgctaccatgcccggctaatttttgtatttttagtaaagacggggtttcaccatgttggccaagctggtctcgaactcttgacttcaggtgatccgcccacctcggcctcccaaagtgctgggaccacaggtgtgagccaccgtgcctgacctattttgttacttcttgaagcgggtaacaccactactgtcatccgatggtgagatggggaccaggaaacagtcacaaagaaaacaccgacccctcctccgtggagctcacggtcagctgggtggtcagagttcgaaatgaataacagagtccagtggaagtgtgttatacaaggacttcatctcaggggacgggagagttctgggaaaggatggatatttaagcttaggccagggtttctcaactgcagcactgctgataatgggctactgcagcactgctgataatgggcctgttcactctcagctgtgggccgtcctgtgcattataggatgctgagcagcatccctggcctcaactcactagatgctacgagcacttttcctctatgagtttgctagggctgccatatcaaagttccaccagctgggtggattaaacagcaaaaatatattgtctcaccgttctggaggccagaagctcgagagcaaggtgttggcagtgttggttccttttgaagcctctccttggtgtgtagatggccatcttctctctatatcttcacatcatcttccctctgtccatgtctgtgtccaaatgtcgtcttcttgtgatagggtttggatttgtgtccccacctaaatctcatgtcaaattgtaatctccagtgttggaggaagggcttggtgggaggtgactggatcatgggggtggacttcccccttgctgttctcttgatagtgagtgagttctcacgagatctggttgtttaaaagtgtgtagcacctcccccttcactctcttcctcctgctccagccatgtagcacgtgcctgcttcccctttgccttccgccatgattgtaagtttctcgagtcctccccagccatgcgtcctgtacaacctgtggaaccaggagccaattaaacctcttttctttataaattccccagtctcaggtagttctttatagcagtgcaaagcagactaatacgtcttgtgagtacaccagtcatattgggctagggcccgccctactgacatcattttaatttaattacctctaaagactctatgttcaaatatggttaccaggggtgagataagatactaggggttaagacttcaagatatgaatttttgaggtaatacaattcagctcataacagccacataccccctagtcatgaaaagctaaaatgtctctagatgctgcagactgaattgtgctccccttctccaagttcatgttgaagccctattgtctcccccgaaggtgccattggaaatgggacctctaaggaggtgataaaggttaaataaggtcataagggtgaagccctgaaccaacagaactcatgcccttacaagaagaggaagagacaccagagctctctcgcccatgtgaggacacagccagaaggcagccatctgcaagccaggaagggagccctcaccaggaaccaaccatgctggcatcctgatctcaaacttccagcatccagaactgttagcagcaaatttctgttaagtcacctagcgcatggtattttggaatgacagctcgacagctcaacaccagacattgccaaatgtcccctgggggtcaaaccctgacctagaccatgataaatactataacatttagcttggtcagctgttgggctgtcaggaggttcggagagaggatatcaggcttaggaacaacattgataaaattccccatggagcagagaactggttgcatccagggcccatggaagatggtgtgaaggcagcagggagaagtggagagagagtggtgtgagctgactgaagaagaagcagcttccagattgttcagggcttggaagtgcaggaaaagaaccttggcccatgttctaagcccgctgggagccagtgacgtgtttaggtgagtggtgcaatgcacctgtggttttaacagaaccgcaccccccagcccacctgtgaggagcgtgggctcagggaggaaagcagtggtaggtggaggccattaggagtagaatggtgctggtctagacttgggggttgagtgtggaggaggtgtgctgggttcccccaagaccaccccagtcttgatgatccactaggaggactcacaggagatgtcgtactcgtggctgtgatttattaccagaagtggatatgaagcagaatcagcaaagggggtgccaggtgtggtggctcatgcctgtaatcccagcactttgggaggccaaggtgggtagatcacttgaggctgggagtttgagaccagcctggccaacatggcgaaaccctgtctctactaaaaatgtaaaaattagccgagcatggtggtgcatgtctgtaatcccagctacttgggaggttgaggcaggagaattgcttgaacccggaaggcggaggttgcagtgaaccaagattgcgccactgcactccagcctgggcgacagagtgagatttccttcttaaaaaataaaaaaataaataaaagtaaataaaagaagtgtatctgactcatggttctgtgggctgtacaagaagcacggcaccaacatctgctcctggcgagggcctcaggctgcttccacttaggtcagaaggggaagggaagccagtgtgcggagatcacatggtgagggaggaagcaggagcgggggcagtgggggagggaagggaagggaagggggaaaggtgccaggctctttttaacaaccagcttccttggaaagtagtagaagagtactccttctctctgagggagagcgttaatcaattcttgagggatctgcccccaagtcccgcctccgacactggggattaacgttttggtgtgagttttggaggaaacaaacagtccctaaattccagactttcagaaggaaagcaggtgttcaacataaactgcattgtttgtacaagcagtttaagtggagcgagtttctcttaccagttaggggggcgggaaccttcctgaaatccaagttcccagactccacccaagggccaaccttgcaaacacatctcattaaggagcccatccaggcctgctgggttaacgcctttctgcacagtagggaagtgaggaatgatttaaaacacatagaggccagcactttgggaggctgaggtgggaggacttcttgaggccaggagttggagaccagcctgggcaacatagcgagaccccatctctacaaaataagaaaattagccaggcatggttgtgtgcacctgtggtctcgctactcaggaggctgaggagggagaatcacttgagcccaggaattgaaggctgcagtgagctagtccagcctgggtgagagagcaagaccctgtctcaaaaaaattatagtaataatgcatataaaacatttatattgaggaggttgagttgatttggtggttcatgtattcatttaccaatgacatggagcatttttgtgccaagtaaggtatcggggacaggatggtgaaaggcacccaggcttattcttacaaagcttccaatccagtgaggatgacagaaaagaaacactcatggcagcaatacatagctggttacagatgggtaagggctgcgaagaaagggaaggggtcctatcagagaaaaggagagaaggggctctttctacaggggaggagacctcaggatggggcactctgagggcgacgtttcagtggatccaaaaagaaaaggctctatgtaggtgttggctgtagcgggaatgggtgggagaggggcttgggggtgagtaccgccatgtagagacgtcatcactatttattctgattagttgctgggatctgtagagtgtcagagaggggtgagatttctgatcaaagacaggggcagcacttcctgagattgaggacatggttagggagagcaggctttgggaggacggtgatgagtgttttttttttttaagacatagtcttgctccgttgcccaggctggagtgcagtggtgcaatcttggctcactgcaaactccatctcctaggttcacgtgattctcgtgcctcagcctcccgagtggctgggactacagatgtgtgccaccacgcccagctaatttttgtatttttagtagagacggggtttcgtcatgttggccaggctggtctcaaactcctgacctcaaatgataatgctggcctctgcctcccaaagtgctgggattacaggtgtgagccactgtgcctggcctagtttttttgtaacagaaatttctctttcacaatttaggataccaaaagtccgaaattaaggtgtcgacagggccgtgctccctctgatggctcgggggggaggatcctgccacctgctttctaacagtggcctgcagcccttggtgctccttggcttgtggatgcagccctcccgtctctgcctgtgttgcctcatggctgtgtcacctctgtgtatctgtctctgtctcttctgttaggagaaccatcatattggattaagggcctaccctattctcctgtcgtctcaactcattacatctgcaacaatcctatttccaaataaggtcacattttgaagtactgggggttaggacttctcttttttggggggttcacagttcaaaccatagcagtctgttctctagtccccccaaattcatgtcctttccacatgcaaaatacactcacgtggtcccaaagttttaatccattccagcgtcaactctaagtgcaaaatctcatctaagcaccatcaactcaaagtttcatctcatctgatgagaatcccacaactcttcatgtcagtcatctacagcaggtatgagggagactcagagtgtggtccattgtggggcaaaattcctctccatctgcgaacctgtgagaaatcagaaagcaagtgatctgcttccaaaatacggtgatggggcaagcaaaggatagacattcccatttcaaaaggagaaaaaggggtcatgggtcctgagcaagtttaaaacccatcagggcaaatgctatgaggtttccaggcctggaacaaatcctctatggttggaagctctgacctctggacctcattttgggtaccttctattcctgttcccttagatgggcagaaagatttgagccaatggttggatacatggtctggtgttcagatgtgagagtcagcctggagatttgggcttcatcatgaagtttgggaattgacacccagagaatgggtgaggttgcacaccaaggcagagagaattgagggagacacgaagaggagggcctgcaacctgtggacgccagcaacatgttggagaagaagctcttacaggaaaaagaggaggctggggttgtgatcactgatcacaggctgggtgggctacaagaaggagggattggctaggtgcagtggcttgcagctataatcctggctactcaggaggctgaggtgggaggatcgcttgaggctaggaattcaaggctagcctgggcaacatagtgagacccccatctctaaaaaaataaaaaaaaaattaacagggtgtggtggtgcacacgtgtagtctcagctacttgggaggctgaagtgggaggatcacttgggcccaggagtttgaggctgcagtgagctgtgattgtgccactgcactccagcctgggtgacagagcaagactctggctcaaaacaacaacaaacccaggagagattggatgatgagcacacatcagtgggatttcccagcacggatggaggtcactggtgattccagggtggtgccagcccttggaacggtggagatgggaagcaagtgggaggggaggaagtgggcacagagggtagatagcccatgatagggaatgaagagatagaggtagcccaagggaaaagtggggtgttatggcttgaattgtgcccctccaaaaagacatgctgaagtcctaaccctgtgaatgtggccttattggaaatagggtctttgcagctgtaaccaagttaggaggtcacaaggttgggccccaatccaacatgactgtgtccttatgagaagaggaagacgccacgtgaagacagacacgcagggaggggaccgtgcgacggtggaggcagacattggagtgatgcatccacaagccaaggagccccaagtgtcgatggccgccaccagaagccagggaggggcaaggaaggactcttctcagagcgtcagaggaggcgtggccctgctgagcttaactttggactcctcgtctctaaaactgcgagaggatacatttctgtggttttaagccactcagtttgtgatactttgttacggcagctgcagaaaacacatgtggggtcagggattgggtgtgggtcaggtttaaaaaaagtgaggggaaaggtcccatcgggagggagaggtgaggatgcaggggatgagggatgatctgggagttgcttgcttgtctgtcataggccagaaggaggatgcctggtgcagagcgaggagtggtgttgatttgaaggcaggtgggaaggaagtttctttttaaggcagacttgcaggttggttgtggtttatctgcccttgatttgtggtaagtcctggagcaccactagccctgcagtgtagaggggcagagaaaggggccaggcagccggggaggaaaagctgtcccaaagctgagtcgggacagtggtgggggctgcaggagctttggagtctcctggtgaattatggagtctatggctcttgggatatggaatgaaggcgtgcgtgtgtgtgtgtgtgtgtgtgtgcacgtctatatgtctctttgtgtgctggtctgtgtgtatatgttatatatatgaacaggtgcatgtggtatgtaactgtgtatatgtgtgcgtgtttgtgtgtatatgtgtgcatgtctgtgtacgtgtgtgcatgtgattgcatgcatgcgtgtgcaagagcttgcagatatgtgtctgcatgtgtgtgtccctgtgagtgtgtgcatgtgtgtgtgtacacatgtgatcactcacagccagggtgggcagacttggggcctgtgagtgtgcccagtaggccaggcaccaaccctcatgcctcttcccttctcccctagctgtgcctgcacgtgaccctgcctggcttcaggaggacaaagtggaggaagaagctatggctcctgggctgccaaccgcctgttcacaggtaggtaagaacttcttgttctaaaagaacactgctgtgcccaaaggctggacttaccttcttcctgtgacctgtctggatcatctcatagggttggtctccatgctttcagggactgggcctcttgcagtgggtgtcagcaagggagcatgggccatgatcccaccacctcattcagaccctccccaggctgctgagcaccaggagggaaaacaaagcaaggatgtcagctgtcctcattttgtggtcttcatggtctcactgaacaaagagttgagtcattttccagatagttccctcttgcctgtaccatgctcaggtctgctggaccctggagctagaagggggacaaatctgtaagagcttcctggctccttgtcaatagataagtcctgtccagaggtcgaggacttgcaacattagttattgcctcttgctgttcttacttaaggagtggagagtagagagaggagttctagttcagagtcctgagctaagggccagattctgcgggatctcagaaccctgtctgaaagtcctctgcctgggttttcccttccccaggcttgccagcctccagcatcctctggcgtactggtgggggtggtccctggctgagccgggatggatgtgtgttttaggaaccagtcacctttgcagatgtggctgtggtgttcaccccagaagaatgggtgtttctggactctactcagaggagcctgtatagagatgtgatgctggagaactacaggaacctggcctctgtgggtaaggcagcttcatcttttctttccttttttttttttgagacagagtcttgctctgttgcctaggctggagtgtgatggcgtgaccttggctcactgcaacctccgcttcctgggctcaggtgatcctcccaccccagcctcccgagtagctgggaccacagggtgcatcatcacacctggctaatttttgtatttttttgtagagatggagttttgccatgtttcccagactggtctcgaacttctgggctcaagtgattcacctgcctcagccccacaatgtgctgggattgcagacatgagccactgtgcctggccaaggctttgccttttcatcacatttatgtaccaaccataagctctagaaattgtgcaagtctgggaaacctagtggtgaaaaaaaagataattcccaccttcatgagcttccagtctacttactggcctttctatggaatgaagatctttttactgccctgtctttctgtgactaaaagtttttgggcttctcaaaggtattccttagctaggcccttggttttgtagaccggagagcctcagtgtcctctgagacctagtgagggaacttgtatttagttgctcagtggaagagtttggctgtggccatcagaatttaggcacatgcattttgccactcccatctctagagcccctaaagacttgagaatatcggccctggtgtcagggcatggcacagtcctcgcacaacatgtgtttttttctcatgagcagctgatcaactgtgcaaacccaatgcgttgtcttatttggaagaaagaggagagcagtggaccactgacaggggcgtcctctcagacacctgtgcaggtgagcccaggcagatcaggtgagcatcagctctggtcagtaaggggagtgtccagtttggaaactgtcttatcagggcaacctattcatacctttgactgagaagcctgtttggttgagctcccttattaaatgccaccttctttcctttttccctttcctttttaatctctaaaactttgcattcatctcctagaaagatctgtcctactttctcttcatatttaatatttccatgtgtatattttatccatttcctccccactgtacattcttgctaatatttttcctcaacattagtcacaatctttgtagaatccttttttggtaaattacctactatttccttcccatgttcctctgattacataacttctcatctagccacacaccttaaaattttccttaacttttagatgcattccttctcattgcaatttcttcccgtacataggaccagtatttgggaaaaaaagtccacatgtgccttgcctacttttgaggtgaccttgatcccacagtttctttctctgtgtgcttaactttttcttccctaattcatttcagaacctcagtgtcaaccccaagaggcaattcctagccaagatacttttacagagatcctgtccattgatgtgaaaggggtaaggctcaccagggattattcatggttctctatagtaggatgagtctggggttaaccgtaagttagaaaagcagcccaagagccaagagcgattcgaggcaagaagtgtttacccagaaggaagcagtttcttgggagagagtccgtgaatgtcatgaattggtggaaaactaaatgtagatcatgttcgtacaagtaagcattttcacagatatgacacatacaaagtgtttaagacttaatttagccttacacaaattggaaaaattctgcatctaagaagctgcatgaaaataatgaaaagatagctctttgcaacagagtatccaccctattccacttgaaggaactctggatagaaatggtatggactccataaatggtaaaagtatcagatatagaactgtctttttcttacattcatttcacataggggagaatatctgtgaatctaataaggcctttggtcttcacattttccttcatcgacaggagcaacctcagcctggagaaaaactctataaatataatgaacttgagaaaccttttaacagcattgaaccacttttccagtaccagagaattcatgctggagaggcatcctgtgaatgtcaagagattagaaattccttcttccagagtgcccacctaattgtgcccgagaaaatccgtagtggggataaatcctatgcatgtaacaaatgtgaaaaatccttcagatacagctctgaccttatcaggcatgagaagactcatactgcagagaagtgctttgactgtcaagaatgtgggcaagccttcaaatattcctcgaatctccggcgacacatgagaacccataccggagagaagccatttgaatgtagtcagtgtgggaaaaccttcacgaggaactttaacctgattttgcaccagagaaaccacacaggagagaagccctacgagtgtaaagattgtgggaaagccttcaatcagccatcatccctcaggagccacgtgagaactcacactggagagaagccctttgaatgcagccagtgtgggaaagccttcagggaacactcttcactgaagacacatctgcgaacccataccagagagaaaccatatgaatgcaaccagtgtggcaagcccttccggacgagcactcatctgaacgtgcacaagaggatacacacaggggagaaactgtatgagtgcgcgacttgcggtcaggtcttgagtcgtctttcaaccctgaagagtcacatgcgaactcacactggagagaagccctatgtgtgccaggaatgtgggcgagccttcagtgagccctcatccctcaggaaacatgcaaggactcacagtggcaagaagccctatgcatgccaggaatgcgggcgagcctttggtcagtcttcacatcttattgtacatgtgagaacacacagtgccgggagaccctatcaatgtaatcagtgtgagaaagccttcaggcacagctcctcactcactgtacacaaaagaacccatgtgggaagagagaccattaggaatggcagcctgcctttatccatgtctcatccatactgtgggccccttgctaattaacttccattttgtaaaaatataaacacatggggctatgactttccctcgtaatactcctttagctgcatcctgtgtttcaatgtataatattttcattttggtttaattgtaagtattgtcttaacctccattatcgtttattctttgacccatctattatttggaattagatttttcaaaactaatatgtggatatattttcatagaggtataatgacttatagtgaaatgcatacatctgaagtgtacagttggatgagtttgacagatgcatacatgcatgtaaccaccaccccattccagatatagaatgtttctatctctctggaaggttcctgcatgttatatggctatttcttagttgcctttttgttgttggtttctaatttaattacatggtgagaagagtatgtggcctctttgttactgagtcataggtatttgctgagatttgctattaggtctggtgtggcttattcttctagctgccaacccaaattaccccttcctccttagaaaagaacctgggttttctgttcagattggcagtgtgcactattaaaaagcttccatctcccggctgggcacggtggctcatgcctctaatcccagcactttgggaggctgaggctgggggatcacctgaggtcaggagttcgagatcagcctggccaacatggtgaaatcccctctctactaaaaatataaaaattagccaagtttggtggcatgcacctgtaatcccagctacttgggaggctgaggcaggagaattctttgaacccaggaggcagaggttgcagtgagccgagattgcgccactgcactccagcctgggcaacagagtgaaactctgtctcaaaaataataataataaaaaaaagcttccatctcccagcccttcttgcaagcaagggcaggccatttcctccggtcctggctagtatgaatatgagaagtcactggatgtgactctggggaagatattgtgttcagggatggtttcatgtagccacatctctccacttcttgccttttggacaagtagacatgatttctagacctagaggagccctcctgtgaccataagggtaaaagccgcaagctaagaagagggtggccggaagtcataaccatcttgcttctgtaatctaaaaaatatttaggatagatttaatagaattggcatatttatgtgattgcagcagccctggactatttatttctggatgtcccatacatgaaaaatatgcacttcttactggtacagttttcttttgtttgtttttgtttttggtgggaggtttatttcacctgaatataattcctaactgatgcacttagtatatgtcagtttttataaatgcttcatggatggttgaaatcaatgtattgtattctacaaatgtctgctagatcaagcaaatgtgtttaaaaaccatctacacatttataaatgttgatctgtgatctagcatttattgagagaggtatgttaaactctcccaccatgattatgtattgctgaaaaatctttgtcattctgtcagtttttaaatttatgtatatacatacatatatatgttttgaagcaatgaaattaaatatagatactgacattttttacatttccaacaaattgttacttttattcttataaagtgatcatccttttccctattactgaacattcaaccattcattgtaatgatagtaaatacttatttagagtttactattaatagatagtagccactgcctgaagctttgcatcttttaatttagtcctcacactgacactttgaggtatgtactgttatccccaattcccagatgaggaagctgaggcccagcaagttaaggtgggctatcaaagtcatctgggtggcatgtgacaggcctgactctctctacagtggcagacccaggggactagtctccatttttacttgttctttttttttttttttttttttttttggttttaaagttctcttaggtataacttacataaacgttaataaatcttagggtacaccttggtgaattttgtatatgtctatacccaccacggtctccatcaaaatattttatcgtcccagaaatttcccttgggccccacctcatcctcaaaggttatcactattctgatgtctatcaccatagatttgtttttcctgttcatgtaaatggaaccataaacagccctcttgtgtctgttttcttcacttaatatagtgtcattgagatttatctatgttgtattatcagtagtttatgctttttaattgctgtgtaatagtccatagtctgaatataccacaatttaaaaattctattctgtttacaaacatttgagttctgtcctccaggttcatccatgttatcacaaatgacagaatttccttcctcatcaaggctgaatagtattccattgtgtagatataccacattttctttatccattcatccaccgatggacagttaggttgattccatatcttggctattgtgaataatcctgcaggttttattgttatgaataaagctgctgtgaatgttcttgttaagtcatactgtggacataggtattcatttctcttgagtataaatgtaggaatggaattactggattttggaggagacctatctttagctttagtagatcttgccagacagtttttcaatgtggttgaaaccatttacacctcaatttgtacatcaatgaatgaaagtttcattgcttcacatccttggcaacatgtggtactgtcacgcaaattaatttgagctacattagtgggtatgcagcagtttcttaggtttaatttgcatattcttgataagtaatgatgcagtggtagatggttgccacaatgacttcttctatccctctatgtatatgtcttttccatgtgactttgcagctcctcctatcaagaggtggagtttatttctccaaaccttgaagacgagcttggtcatgtgactttctttggccaatggagtgttgacaaacatgacagaagcagaggctggaagaacacacgttgggcttttccttcttagttgtgaccatttgtatgtcatctgtggaaaaatgtctaagtcctttgaccatttttaaattagttttttgttgttgttgagttgtggaagttctttatatattctgaatattaaccccttatcagatatatgatttgcaaatattttctcccattctaggggttacctttttactttattaattgtatcctttgatatgcagaagtctaagattttggtgtagtccaacttatagatattttttgttttctttagatgtcatatccaaaaaatcattgcaaatctaatgtcgtgaggcttaccccctatgttttcttctaagagtcttattgtttcagctcttgcatttaggtctttgatgtattatgagttaatttctgtttgtttgtttgttcgtttttgtgtttttgagacggagtcttgctgtgttgcccaggctggagtgcaatggcgcaatcttggcttaccgcaacctccgcctccccggttcaagtgattctcctgcctcagcctcctgagtagctgggactacaggcgcataccaccatgcctggctaatttttttgtatttttagtagagatggggtttcaccatgttagccaggatggtcttgatctcctgaccttgtgatctgcctgccttagcctcccaaagtgctgggattacaggtgtgagccaccatgcccagccaagttaatttttatatatggagtaagaaaagagtccaacttcattcttttgcatgtgcatatccagttttcccagcaccatttgttgaagactgtcctttccccattgaatggtcttggcacccttgtcaaaattcatttgactataaatgtgaggttttatttctgggctccctcctcgattccattggtctatatgtcttatctttatgccattaccgtattgtgttgattactgtagttttacaataaattttgaaataagtgtggtgtgagacctccaactctgttctttttcaagatggttttgacttcttggtttggtattcttgagatttcatatgagttttaggatggatatttttctgtttctgcaaaaatattaagtcattcagcccgtgaacatagtatgtctatttgtgtctcttttaagttctttcagcaatgctttttagctttcagtgtacaggttcttcatctcattggttaagttaattccaaagtattttattgtttttaatgctgttgtaaatggatttgttttctcaatttcctttttgggttgttcattgttagtgcatagaaatgcaactgtttttttgtgttgatcatcacacttcttttgcaacccatattatgaagtgtcactactctccttggtccaagttaaaatgctttcctggatccaaatggcatttcttttgtggggaattatcaacagtaaagatctaggttgatcaaaactcaagtgtgagaaatgaccaacaggagagggcagagatatccatgggatggagatgaaatagcctttgttattatgggtatattatgggcctcttttctcatccaatccaggatgctgacattcaaggtgacagatcagctgttcatcttgggctgcacctggtgtttgggcattctgcaggtgggcccagttgctatgctcttgcctatctcttcaccatcatcaacaccctgcagggtgtctccatcttttggtgtactgccttttcagtcaacaggtgccactgtctaggtcccactcaagactcttcttgtccttgcctatcttaatgagctgacccagaagatgctttgcctctagcaggtctggggacaaaacaagaaatggttcaaaaagatcagaatgagaagagctaggtctgagaaatacacacactttagaagggctgtgcctgatgccttcaaacctagcacagtaagatcatacattgctcttccccacatagcttctcttactgattcacttggggagcacatggttataacactggcaacctggtccacagtgggtgatgttctaggatggctcacacgaggatgggtcacacttggttgatttattggatgacattttctccattaaaaagtttgtttaagccgggcgcagtggctcacacctgtaatcccagcactttgggaggccgaggcgggtggatcacctgaggtcaggggctcgagaccagcctggccaacatggtgaagctccatctctactaaaaatacaaaaattagttgggtgtggtggcgggagcctgtaatcccagctactctggaggctgaggcaggagaattgcttgaacccaggaggcggaggttgcagtgagccgacatcatgccattgcactccagcctgggcaacaagagtgaaattttgtctcaaaaagaaaaactttgtttaaaaatttggctattcctcattaggtgactgtgctgcttgattcttacacatgtgcattaattctttccgtgaaaatattgagcacctatttggtgctgtatttaatgctatgttcttcataaatgtaggcaaataccaagcacttttagggagagatgtactgtgttagtctgtttttgcattactaaaaaggaatacctgagactgggtaatttataaagaaaagaggtttaacgggctcacggttctgcaggctctacaagcatggcaccagcctctgctcagcttctggcgagggcctcaggaagctcacaatcatggcaaaaagtgaagcaggagcaggaacatcacatgatgagaatgggagcgagcaggcaggggagattgcatgctcttttaaacaaccagatctcgcatgaactactagagtgagaactgacagcaccatggggatgacactaagccattcatgagggatttgcccccatgatccgaatacgtcccaccagtccccatctccaatattggggattacatttcaacaagagatttggaggagacaaacatctaaactatattattctgcccctgccccttaaatctcaataccttctcaaattgcaaaatacaatcatcccttctaaatacctccccaaagtcataagttgttccaccatcaactcaatcaaaagtcccaagtcccaagtcaaaagtctcatctgaagatgaattccttccccgtgagcctgtgaaatcaaagacatgttatttacttccaagagaagatggtggtatgggcactggttaaacattctcatttcaaaagggagacacaggccaaaagaaaaaggcaacagacctcatgcaagttgtaaacccagaagagcagtcattaaatcttaaagctccaaaatctcctttgactccatgtcctgcgtcaagacacactagtgcaagatatgggatctcaaggctttgggcagctccagccctgtggctttgcagggtgcaacccccatggctgctcttatgggttggagttgagtgcctgcaggtttttcaggcagagggcacaagctgccagtgaatctaccattctggggtctggagggaggtggccctccagctccactaggcagtgccctggtagggattcttgtgggggtacgggggaatccaatcctaatagagttcctctgtgggagctatgccccaatgtcagtctccttcctgggcaccgtggcttttccatacatcctttgaaatctaggtggaagccactaagcctccttcatgcttgcaatctgagcatctgcaggcttaatactacctggaaccaccaaagcttacagcttgcaacctgcagagctgcaacccaagctatacctgggcccctttgagccaaggctggagccttgagtggctggaacgtggagaatggtgtccaaaggctgcacagggcagcggggccctggaactggcccgctaaatcattcttttctcctaggcttctgggtttgtgatgggagaggtggcctggaagatccccgaaatgccttcaaagcctttttccttttgtcttggatcttagcacttggctcccttttagtcacgttagtctcttcagcaagtggtggttctgcagccctcttaaattcttcccccgaaaatgctctttccttctttaccgcatggccaggttgagaattttccaagtttttatgctctgcttccctttttaaatataatgttcaactttaattcctttgctcccacatctgactgtaagctgttagaagcagccgtgcctctccttgaacactttgctgcttagaaatttctcccaccagacactctctaagtcattactattaagttcaaacttcccgaaagccttaggacatagacgcaatgctgccaggtcctttgccagggaataacaaggctgacctttgctccagttcccagtaagttcctcatctgagacctcctcagcctgaccttcactgtccatatctctaccagtattttggtcacaaccctttaaccagtctccaagaagttccaaactttctctcatattccttcttccttctgagccctccaaactcttccaacttctgcctgttacacagttctaaagctgctttcacattttcagaaattttctgtattagcctgttcttgcgttgctataaaggaatacctgaggctgggtaatttataaagaaaagaggcttttttttttttttttttttttttgaggtggagtcttgctttgttgcccagacagtgcagtggcgcaatcttggctcactacaagctccgcctcctgggttcacaccattctctcacttcagcctcctgagcagctgggactacaggtgtccgccaccacgcctggctaatttttttgtatttttagtagagacagggtttcaccgtgctagccaggatggtctcgatctcctgaccttgtgatccgcccgccttggcctcccaaaatgctgggattacaggtgtgagccaccaagcccggcccaagaaaagaggtttaattggctcactgttttgcaggctgcacaaacatggtaccaacatctgcttgtcttctggtgagggcctcaggaagcttgtaatcacagcagaaagcaaagcgggagcaggcacatcacatagtgagaccaggagcaagagacagagtagagacgttccatactcttttaaacaacctgatctggtgtgaactaccagagcaagaactgacttacagcaaagggattactaaaccattcatgagcgatttgcccccatgatccaacacctcccaccaggccccacctccagcactggggattacatttcagtgtgagatttggaggggacaaacatccaaactatatcatgtacctattagttaaatataaccaaatatctgaggcagtgatttacaaacttaagagtcccagtatcctaatcatttcctttaatcccatttaatgttaagtctcaccttataccctcttgcccacaatggtggaaaatcaatggcttatgtatacatgcatgcaggtacacctttataaagtaaactgagctatcttaccttggaattcagagtttataaaaatttccagtacttaaaaatatatttggccaggtgcggtggctcacgcctgtaatcccagcactttgggaggctgagacaggtggatcacgaggtcaggagatcgagaccatcctggctaacacggtgaaaccccatctctactgaaaattagccgggtgtggtggtgggcgcctgtagtcccaactactcgggaggctgaggcaggagaatggcgtgagcctgggaagcggagcttgcagtgagccgagattgtgccactgcactccagcctgggcgacagagcgagactccgtctcaaaaaaaaatttttttttcagaatactcaagctgcaaaatttgagctgagacttggtaaaggcatgagataattcttcgaatattttttctatctacaggctgaagacagaaacctcgctgcttagtgtctcttcttatgctagggtgtgatgacagtctgtttctctgaggtctggctgaagttgtgggggtggtcttctcctctcatccctgaggtctcttctgtagcttcatatcagtttttaaatggtcatgttatcttgctaggatatgtagaaactttgtcttatgtttagctttgaagaatttcttgaagcacatcacttataaatgtattcaatagaaagatgagcaggtgaagccactcatctcaaacaacagttactgcatcaaactttctctagacctgggaatgagtgacctatgacgacaatggaaaggatgaagaaaatggcaaaaacttccatgtgaatccctttacaccttaggtcatgttgaatataaaaatgctctagcaataaatgctgggtgctgcaaagtgaaaccagcactgaggcaaaagttctctcagcaaggcagtttacttctgcagaagggtgccacccacgtcaatcaagatccaagagcacagagaacaaaggaggccaggggggttttatatccttaacgcaatccctgcctccatgtccttcccccatgggctggggtcggcacaatgtaagctgacccgattggctacttgcgaatatttctctcaaataaagaagggggaaggggacgtgagttacaatggtgggacgtgcagttttgaagggtatgtgtgtggttttgaggggtggaacgggtgcagaatgcgtgaccgagggaacagatgtgagttattgattagtgccgacgggaaggctgtttatagtaacttggggcagggaggcatagagacaaggaagttaacagactgaacctttgaagagaaaccgagagattcattgcatcctacagtcagggtttctcaactgtgaccttattggccagataattctttgctgtaggaactgccctatgcactgaagactgttgagcagcatccctggactattaactaaatgccagtagcttgggttggggagatgttggtcaaacgatacactttttttttttgttttttgagacagggtctaattgttgttcaggttggagtgcagtggtgtggtcacagctcactgcagcctcaaactactgggctcaagtgatccttcctcctcagcctccagagtagctgggaccacaggcatgcaccaccatgcctggctaatattttttgtagagttagggtttctccattttgcccaggctgggcttgaactcttgggctgaagcgatctgcccaccccagcctcccaaagtgctgggattatggtgtgaaccactgcgcccggtgggatacaaatttcagttagacaggaggaagaagttcaggagatcaattgtagagcatggtgactatagttaataataaattatattcttaaaaaatgctaagagagtggatgtaaattgttctcaccaccaaataataactatatgagacgaggcatacattaatttgctagatctggttattccccaatgtatacatccattaaacatcatgttgctcttgataaatacatccaattttatctgtccaaagaaaaatgccagtgggatccctgctagttgtatactggaaagggcagaaatcctcagttctttgttgtcttgagagaaagattttggctaaaatgactactttagccaaaaagagaatttattgaaggaaaatagagagaagagagttatttttattttttattttttgagatggagtctcgctctgtcacccaggctggagtacaatggcacaatctctgctcactgcaacctctgcctcccaggttcaagtgattcttctgcctcgcagcctcctgagtagctgggattacaggtgcccgtgaccatgcctggttaatttttgtatttttagtagagatggggtttcaccatgttggtcaggctggtcttgaactcctgacctcaggtgatctgcctgcctcagtctcccaaagtgctgggattacaggtgtgaaccaccgtgcccggccactgtcttcattttcagaatgttccacttagttcttcccagccccttctctcttatcccaccatcagtctgtccttccttccttctttccttcctcccttcctctctttctttcacttttttctttttctttctttgcttttcctttctctatctcctttctttttctttgtcttcctctctctttctgtatttcttgcactgtaaatttaagagtttattatttaaaaaaagttaaagctagcaaagcagtttgtaataacccaaactgggaacaacccaaatgtctatcaacagtgatttttttaatttcaacttttatttttagattctgagggtacacgtttaggtttgttacaagagtatattgcatgatgctgaggtttggggtacaaatgaatccagttagtgagcatagtacctgataggtagtttttcaacccttgccctcctccctccctcctccatctagtagtccccattgtctaatgctcccatctttatgttcacgtgtacccaatatttagctctctcttacaggtgagaacatgcggtatttggttttctaagttaattcacttaggatgatggttccagctgcattcatgtggctgcaaaacacaccaccatcagtctttcaaactcccatcccagaatgccctaaatagcagatatttaggacattcataggcagtcccttacatgctgccctggtctcaagcaccgcccctcctgccccctccccccaaggattggcccctttattcattcaatttctcttctctttccctcattcttcctccttataattcccttttcagccacccaactaatttggaagaatttccacatccagtactctcttgcatgttcagatcgctagaatccaacctctggatatcaaaggatcactactggggcttgaagactccaaatctgcagattctgaagcttgcaggtcagtggccttggactttcaaacttccagttccgtgacatccgggctccttaacttccggcttccgggagcttagtcacatacttctggcttccggattgtaggttccccgcaaggagactaaggcctgtgtgggtctttgtttccccagccgtgcaatgactgttagatgcagaaagggggaaaacagccagggaaactgctcacagtggacccccacggtggagagctggagggagagggttcttcaaacgtgtaccctagctcctttgtctgctgtctttggtgggcgtggtcttgtacttaaaatccagctgagaagccaaactctaccttaaagccgtatttcatgtttcaaactggatgatataattctggagaaatgagatgggaaactctgctgcctacttgccccttaactcttgtttatctttgggtttcttactacataccagagcttaatctttattttcttacttaatattcaaacacaacccatgagcaaattaacattatttccatcataaataaagagaatggacttaataaatttaaaaagtgaagatatgggggcaaatggatgctgccatcagctgaccctagagtttcctctgaccttccttccccaacctcgtctgtgtttcacttctgccatgtccttaaaggggctgtgtgtcccccagaccacagagtccattgcactgcacctttccttcctcctcattttccatcttacaaatcatcaatattcctggatgtaggatcatgtctgtcttatatgttttagtttctctcaatttagcattatgccttgcacgagagtataggaatacctcatttcattgcccttcacagatattgcattttttacaaattgaacgtttatggcagccctgtgtcgagcaagtctgtaggtgccattttcccaacagcatgtgctcactttgtgtccctgcttgagcattttttaggaataaactatttttaaattaaagtatgtacattaaaaaaaagacataatgctattgcacacattacagtatagggtaagcatacttttatgcacactgggaaaccaaaaaatgtgtatgacttgctttattgcaatattcacattattgtggtgatctggagtggagcctgcaatatctctgaggtgtgtctgtatgtgctcatcacatatgtgatgaatggatgaataaattagtgtagagtgaagtgcttccatgaacctgaacatcatggtctggaaactatgggcagtgagtcaaatctgacccaccatctgtttctgtacagctaagaatagtttttacatttttcaaatgggtgaaaacaaataaaaagaagaatgatattttgtgtcacatgactgatatatgaagttcaagctcagtgtccataaagttttattaaaacatagccatgatcattcatttatgattgtctatagctgttttcatatcacaatggaagttcaagttcagtgtctgtaaagttttattaaaacatagccatgatcattcatttatgattgtctatagctgttttcataccacagtggtagaattgagttgctgtaaatacctggctcacaaagcctaacatatacactatcaggctctttaagaaaacatttggcgacccctgctctaggtagactctatggggatatgggctctacactcatagggacccacatgttccaagcctccagctgtgtgttctgcttcctcaagcagcagctgactctgatattccccatctcaccttagcagtctatatcaagcaaagggcacgcagaatcccatgcacccatcatgtatgtaataaaaggcagatattatgtggtctcttgaaccagccttaggcatggaggttgaggatcaggagtgacttgagggtactgactggcagagcaggagccccgttattttggacaaacaccgccactttaagtttcagcttcatttttagccttctggatttaaggaaattacttttttaaaaactataagcagccaaaaaaagcagacagtaaaatgcagataaaacagctcgggcacagaggaaggtggaggaaaagtctcttgggtaactgccaaacttcaccctcatacaatgggccccagtaaaacagtgggccttaataagcacattcctttccctccaggtgcactaaaatagggaagctaaaagcagacttggggggtatgcctacagctgcagaaaaatgtataaaagcaaacacaccactctccctcccatataagcacaacaaaaaaaacacagaagcagtccaagcctctaagaaactctcccaccctaaatccttaaacactcttagtctgtagaaaagactctaacctaattcagccagcagcccctctcaggtgtgttttctctaaaataaacctgtcttaaccatcaagccactttttgtgtttctttcctctttctttaattcttacactgacctagtggtggaggcttggcaaggatgcctgttaccaagtgggttacttctgcactatttatagagaaggagaaatggctaaaagtagaggtaccaggttgccaacaatggttacttggggggtagcattcaaagttctccaaagcccctaaatcaatactcattgagcttatacggacaggcacagagcagtgaaaaatgtgagttgcactgggaaatgttcccagctgagttgacaaagcaatgctctgtaatgttttggttcttataaaaaggtgcccagaggatggagatggtaggtagtgtagggcagtgcaagaagctccagctctgggaccagttggatggggtttgaatcctaaccctggctcctgttagtgggatggcctcaggcaagtcacttaacattcaggatctcaatttctcttttgtaaaacaaatagaggctaggtgcagtggctcaagcctgtaatccccgcacttagggaggctgaggcctgcggattgcctgagctcaggagattaagacctgagcctgggcagcatagtgagacccacgtctctacaaaaaatacaaaaattagcccggtgtggtggtacacacctgtagtttcaaatacctggagggggactgaggcaggaggattgcttaggccttgggaggtcgaggctgcagtgagcagtgtttgtgccattgtactccagcatgggtgacaaagcaagaccctgcctcaaaaaaaattagaatctaccaggttgagttgcttttggaacttaatattatcatctatgtgagatttcatatatttttgtatttttactagagacaagatttcaccatgttgaccaggctggtcttgaactcctgaccttaggtgatctgaccacctcagcctcccaaagtgctgggattataggcgtgagccactgtgcctggccaggagcagaggtttaataggcaaaagaaagagaaaggagaacagctctttctcttgcatgggagaggggcgtctgaatgggaaatctgaccctcgtcatagtgtaccagattttatagacaggcttgagaaggcggtgtctgatttacctagggcctacccctatgtgagctggccaccccaccctaatcttattatgcaaatgagctttggctgacactatgttgcctgctttttactgtacacatggctggcaaagagaagggaacttggagccgccattttggacatgcctagtctaggtagctttttcctattggcacagctgccggcattcacccgtggaagcttccagcttgcttgtctatgtctgcagctcgattttacaggctgttctttgttagaaaagaaaatgattttgggggctgcttttcattaaatggaaaaccttactgaggacttcctacccttgctatttgcctaaatgatttctccttaactcctatatcatcaccatgcttggctaatttttaattttttttttgggtagagatggttctcactctgttgcccacactggtctcaaactcctgggcttgagccatcctcctgcctcaccctcccaaagtgctaggattacagggcatgaactgtgccatacccatcttcgaggttttatggtcatgtagaatttctgttcaaggaaagcagataacagacagggttaagggcatttgcttggaatatttaggagttttgcaggtcattcctttgaaatggaatttgttgcacatccccgatctgagattagaaacttttctgcatgttggtgtgaagacgaaagaagacagtgtttataaaatagtttatacttcaattgcctagcagtagaaacctgatttctaggaatttcggcttctgagtcaactctagctgcaagagccacttcattttcccctaaaagctccatgaaggcaggagccgtgtctctcttgatctatgtgtgagtaatcaatatttttcacatgactaaataatcaaacccgtagaactagagaacaacaaaaacaaaaacaaaaaattaagaaatccagatcgtggtgtgaacattctagtcctttcagatgttgtcggtatgaaagtcctcttaggctcgttttcctgcttcattttaagatttggaggagtctttgtaggaaggagaggctgtgaaagaggtcttaacgttctatagcttcataaatattgtgcttcagagtgaccaagatatgggccacagctggccgtccatatgctgagagtttgatgagcacattgcagggcatggaagatttccggtttctgcaggaattgaatgcctagcacgccttccataacatccttcatattgctgacatggtgaatttcttgaaacacacagaacaaagtcttttctttcccctctagatggctcaaagattgttcagattttccacgggcaaagagggaagatcttattcagaagatttttctagttaacctgaaatatatatatatgtatgtattttgttgttgagacagagtttcactcttgttgcctgggctggagtgcaatggcgcagcctcgactcactgtaacccccgcctcccaggttcaagcaattctcctgtctcagcctccagagtagccaggattagaggcatgtgccaccacacccggctaattttgtatttttagtagagacagggtttcaccacgtaggccaggctggccttgaactcctgacctcaggtgatctgcctgcctcagcctcccaaagtgctgggattacaggtgtgagccactgagctggcctgaaatatatatatatttctaaatatatttagaaacatagatatatttagaagtatatagatatttagaaatatatagatatttagaaatacatagatatttctaaatatatatatttagaaatatatagatatttagaaatatatagatatttagaaatatatagatatttagaaatatagatatttagaaatatatagatatttagaaatatagatatttagaagtatagatatttagaaatatatagatatttagaaatatatagatatttaatatctatatatttagaaatatatagatatttaatatctatatatttagaaatatatatatttaatatctatatatttagaaatatatatatatttagaaatatatatgactatagaaagaaaacctataatttccattttgaaaaagaaataagaaattagttaaataagtagattatagctgcttgtgccacaaaaataagtaactatgtgagatgatagatatattaatttgcttcacatatagataaccattttattatctatatgtatcccataacttcatgggttaaacctcaattgtgtgtatacacaataaaatttattaaaaaaaagaaatttaagaagtcttttttttttttttctttttagagacagggccttgctctgtcacccagtctggagtgcagtggcaccatctctgctcactgcaacctccaactcccaggttcaagtgatcctcctgcctcagcctcccgagtagctgcaactacaggcatgtgccaccactcctgtctcattttttaattttaattttttgtagagatggggtctcactgtatagcccaagctgctgttgaacttctgggctcaagtgatcctcccatctcaacctcccaaaaatgctggaattctaggtgtgagccaccatgcctggccaagaagtctttaatcataaggttttcttaccatatgtatttgtcagggcaacatcaaaaggccatatcagctttcattttgctccatcctgttctttctcagaagccccatctttgtatgcctcctaaaccccaagttaccaaagttaagaggaagtaaatgtgttgcagtaaagtatctatctgggccaggtgtggtgactcacacctgtaatcccagcactttgggaggccgaggcgggcagatcacttgaggtcaggagtttgagaccagcctggccaacatggtgaaaccctgtctctactagaatacagtagtaataataataatcaattagctgggcttggtggcaggcgcctgtagtcccagctactcgggaggctgaggcaggagaatcgcttgaatctgggaggtgggggtcacagtgagccaagatggtgccactgtactccagtctgggcgacagagtaaaactccctctcaaaaaaaaaaaaaaaagttgtatctgaagtagggtgattatagttaacattaatctaccatacatttcaaactagctagaagagaataatttgaatgttattagtacaaagaaaagataagtatttaaggtgatagatatcttagttaccctgatttgcttatatgagtgtagcaaatgatcacatgtacctagaaactatgtacgtctattatggatcaattaaaaaacatttaaaaagatctatctgtttccaaatgtatgtcttgacctcggagctccagggtttgtgtaatgttgctttaaatgtggagtcataaaagaagccaggtgggaaattaatgaaatgttagaagtgttatctattgttaaccacataagatttaaaggaaaaagcactgaattccttttttttcccctgagacaggggtcttgctttgttgcccaggctggagtgcagtgatgggatcatagctcactggatacttgacctcctgggctcaagcaatactccaatcttagcctcccggtagctgggactacaggcatgcaccaccatgcctggctaatttttatactttttgtagaaacggaattttgccatgttacccaggctggtcttgaagtcctgagctaaagtgatctgcctgcctcggcctcccaaagtgctgggattacaagcgtgagccactgcgcccagcctgaattccttttttccatatcttttccatctccaatatgagttatttattcctaggttcataggaaactcagtgtaatttctatggttcgagatggtcagcttcacttgcttatatagttagtatttaatgcataattaatatgtgctcaagagattaataaatattgtgcttcaggagattattcagtagtgatcacaagacattttgtttttatgaaacaagactgcagaaagccatggcagagactgcagaataagagcaagacacacattttcttttcttttcttttctttttttttttttttttgagacatagtctcactctgtcacccaggctggagtgcagtggctcgatcttggctttactgcaacctctgcctcctgggttcgagtgattcttgtgcctcagcctcccaagtagctggaattacaagcatccaccaccatgcctggctagtttttgtgtttttagtagaggtggggtcttgccatgttggccaggctggtctcgaactcctgacctcaagtgctctgcccgccttggcctcccaaagtgttgggattacaggtgtgagccagcgtgtccggccaaggcacatacattttcaaacaccagagataacaagttttaggaaacagtagaagataaaatgacattaagtaatgcaatggattttcttggtcctttgtcagtagctggtagaaatatctgatcacacaccttaaatttcagaagcctttgttggctatctgatgacctaactctaattccctacacaaaagtacatgtttcctttcttcaatgtgtatatatcatttctagtggctgtgtggggtgaaagggtgataaatatttatgcaaatatctacaatatgaggcaggttttgatgattctacaataggtaaacccaaactatatgggtatgagagacagaataatgaccccccaaagaggttcacatccctaatccccagaacctgtaaatgctacctgacatggagaaagagactttgtagatacggttatgaaaaggatcttgagatgggaaaattgccctggattgtcttggtgaacccaatgtaatcatcaaggtctttataaagtatgaaggctgtaggagagtcaaagacagggatggactgggcgcagtggctcacgtctgtaatcccagcactttgggaggccaaggcgggcagatggcttgaggccaggagttcaagactagcctggccaacatggtgaaaccctgtctctactaaaaatacaaaaattagccaggcgtggtggcgggtgcctgtaatcctagctactcgggaggctgaggcacgagaatcacttgaaccctggaggcagagtttgcagtgagcccagatggtgtcactgcactccagcctgggtgacagagcgagtgagactctgtctaaaaaaaaaaaaagaggatggacagtcaataatatgggaatgtggaaggtggatggtcatgtttggttgtatgattgagagcatggagtttacaatgtgtcatcatgatgacttggatttgtgtgtgtgtgtgtgtgtgacataggtggtgagggcatttagtgagaacagaaaaggaaatagaagatcctgtgttggaaacagggattgtgcaggttggatgaaaaaggtaatgaggccaggtgtggtggctcacgcttgtaatcctagtactttgggaggctgaggcgggcagatcacctgaggtcgggaatttgagaccaacctgaccaacatggagaaatcccgtctctagtaaaaatacaaaattagccaggcttggtggcacatgcctgtaatcccagctacttgggaggtggaggcaggagaatcgctttaacccaggaggcggaggttgcggtgagctgagatagcaccattgtactccagcctgggtaataagagcgaaactccgtctcaaaaaaaaaaaaaaaagaaaaataaaaaaggaaaaaggtaatgagagaaatgcaaatgtggaaaaagtgcctggcagcatggtgggcttcttttcaagactttaaaaaatttattatttatgtatttactttacacaaggggtcttgctctgtcacccaggctgtagtgcagtggcataatcgtagctcaccgtggccttgaactcctgggctcaagtgatcctcctgcctcagcctcccaagcagctgggattataggcatgcaccaccatgcccagctagtttttatattttgtgtagagatgggattttgccatgttgcacaggttggtctccaactcctgggctcaagcgatcctctcgcctcccaagtagctgggactacaggcatgtgccaccacgcccagcgaatttttaaaacttttttatagagatggggtctcgttacattgcccaggctgaataggctgttttttttttttttttttttggcagagtattgctgtgttgcccagggtggagtacagtggcatggggcaatcttggctcaccacaacttttacctccccggctcaagcaattcttgtgcctcagcctcctgagtagctgggattataggtgtgcaccaccatgcctggctaatttatgtatttttagtaaagatggagttttgccatgttggccaggctggtctcgaactcctggcctcaggtgatttgcttgccttggcctcctgaagtgctaagattataggtatgagccacggtgcctggccctgaatgggctctttaaatgtgaagcaagactcaagaggcctaaatctcactggctgaagagactctgtacatttcttttttttttttttttttttttgagacagagtctcgttctgttgcccaggctggagtgcattggcgcgatctcggctcactgccagctctgcctcctgggttcacaccattctcctgccacagcctcccgagtagctgggactacagtcgcccaccaccacgcctggctattttttttttttttttgtatttttagtagagatggggtttcaccgtgttagccaggatggtctcgatctcctgactttgtgatccacctgcctcggcctcccaaagtgctgggattacaggcatgagtcactgtgcctggccgagactctgtacatttgacacaaatccaagtagtcttactttgctcatcagtgaaatggggttagaattacacatataatctggagaagatggaagaagaggtgagaaaaatacaacagaactttgtatgtctacattaataaatgttggttattagtcatcaatgtcatgaattatcccatgccattgaggcataggataatatggcttcaagtgatccccaagttgtcccgggctcaagtgatcttcctgctttggcctcccagagtgctggcattacaagcttgaaccactgttcctggctgatttataaaaaagcatttaaactgagatcattgctaatggttaatgagtcaaggagtcgctcaaatgtgaaccctcttagggcatcacccgctgattcccaggttgcccagtgtgtttttaaaactttatttatttaattttgttatttgtattattttctagagaagaggtcttgctgtcatccaggctgaaatgcagtggcacaatcatagctcactgcagcctcaaactcctgggctcaagtgatcctctcacctcagcttcctgagttgctgggactacagatgcacacaaccaccctcagctaatttttaaatgctttatagggacgaggtgtcactgggttgctcaggctagtcttgaactcttggcctcaagcagttgtcctgcctcagcctcctaaagtgctgggattacaggcatgagccaccatcgctggccccattactgcttttctttctgagttttgcagtgggtagagggtgctgagtagaggcactgcccactacccactactaagtggtagttggtagaggcagacttgttaagaaagcctaaatcccagttaacacttatttctgtttaattcataaatatgtacagcatttcctcccatgcttgccttattgggtggtggtgccaagtgactgtgagatagacttgtatgtagaggaaagggatagggtaaatgcttctaggtagaatgtgcatcactgcttcagatcaattcctgctcatttagttaaccatgcatggcacatagtaggtgtccaataggagtgtttgtgtgtgagagtcaaactaagcacagttccctaaggagtaagagccaaggattttttttttttttttaatttttgggatagggtctcactctgttgcctgggctggagtgcagtggcatgatcatggctcactacagcctcaacctactgggctcaagtgattgtcccacctcagcctcccgaggagtagctgggactacaggtgtatgccaccatgtctggctaatttttatttttattttttgtagagatgggatcttgctatgttgcccagggtcatcttgcactcctggcctcaggtgatcctcttgcctaggcctcccaaatgctgggatgacagtgatgctgggatgacaggctatgactgattaaaaaaaaacatttaaactgagatcattgctaatggttaatgagtcaaggcgtactcagatgcgagcctttctagggcattgcctgctgtattcccaggtttccttgtgtgataggcacatgctcctcaggtgggtcggttagtgaagtgctctggagcaatgcgtgatcttaccgtgctgggtttggaggtgtcagccttagcactgctggagagtgtgtgcatctcagactcagttttcaatttcctgatccctttggaccatttcccatattgctcccggacctgcagaggcaaagtgtgtactgggtcagctcacagagagcagtgaggacaggaagagtcctgggtgggagctgggcagtggtacctgctggctgaggaggcagtacaccaggaagatgaagacaccctgcaggctgttgatgatggtgaagaggtaggccatgacccgggcagccggacccacctgcaagatgcccagacaccacgtgcagcccaggatgaacagctgagctgtcgctttaaatgccagcatcctggattgagtaagaaaggaggctggtgatgcacccagagaaagagaatcaaggctatttcatctgtgcccatggagtcccctgccctcccctgtagatgatttctcagactgggctgtggtcagcttagatatttactgtcaactatagcccacagtagaaatgccacctggggttggccacggtggctcatgcctgtaatcccagcactttggggggccaaggcaggcagatcacctgaggtcaggagttcgagaccagcccgaccaacatggtgaaacctggtctctactaaaaaaatacaaaaattagccaggtgtggtcgggggggcgcctgtaatcccagctactcaggaggctggggcagtagaattgcttgaactcaggaggcggaggttgcagtgagtcgagatagagccactgcactccagcctgggagtgacagagcgagactctgtctcaaaaaaaaaaaaaggattatttttgaatatgcaaagagatttctgtgttcatgaactacacagtctcttcaaatcaccaatacaaccaggcatgacacacaaaatttggaaaggataatgataggaatctagaagaaagttcattaattttgcacaagggtgcctggaacaacaaactgctcaaaccctgtagaggaattatttttatttttatttatttatttttttgagatggaatctccctctgtcacccaggctggagtgcagtggcgtgatcttggctcactgcaacctctgcctcccaggtgaagtgactctcccacctcagcctcctgagtagctgggattatagacgcccaccaccatgcctggctaatttttgtatttttagtagagatggggtttcaccatgttggccaggctggtcttgaactcatgacctcaagtgatccgcctacctcggcctcccaaagtgttaggattacaggcgtgagccaccatgcctggcccccgtaaaggatttaatgttgattaggattttcccagagggaggattgcatgagaagtgatgaggagcctgaactgagggtacggtatgaaggtgcagactgggctgtgggaacaggcaagaaaatgtacgtgttctttgcacttttttttttgagttggagtcttgctctgtcacctaggctggagtgcagtggcgcaatctcggctcactgcaacctctgcctctcaggttcaaacaattctcctgcctcagcctctggagtagctgggattacaggcacccgccaccacgcccagctaatttttgtatttttagtagagacggggtttcaccacgttggtcaggctggtctctttggccaggctggtctcgaactcctgaccttgtgatctgcccccgcccctcagcttcccaaagtgctgggattacaggcatgagccaccatgcccggccttctttgtgcttttgttataggactgctgacaaaagtccaaagaagtttttaaccttttagtttattgattcgtaatgtttgtacatctttgtggggacatatgtgatattttgttaacatgcatagagtgtgtcatgattaagtcagagtatttggggtatccgtcacttcgcgtgtctaccatttgtatgtgttgggaacacttcaaattctcccctctagctattttgaaatatacaacatattgtgaactagagtcaccctactctgccatccaatattataacttattccttctatctgactgtatgttgtacccattaaccaacctctcttcatcgccttgcccactcacataccctttccagactctggaatctatcattctactttatttttatttttagtttttgaggcagagtctcactctattgcccaggctggagtgcagtggtgtgatctcggctcaccgcaacctccgcctcctgggttcaagcggttctcctgcctcagcctcccgagtagctgggactacaggtgcctgccaccatgcccggctaacttttatcattctactttctgcctccacaagatcagcttcttcggctcctctctatgtaagtgacaacctgtggtatttgtctttttgtgcctggcttatttcacttaagagagtgacctccagtttcatccatgttgctgcaaatgacatggtttcattctgttttgtgatcgaatcgtatcctattttgtatatataccatttaccagtcaatgaagattcttcctgttgctctgggattcacaaactgagattagacatggacaaaacatgttgcatggggtctcaacaggataccactgaatctgtgatggctgccatagaaggatggctgcgtctgttttttctgggtcccttcaaaagaccctgagaagggacctcagtggctgctgaggcacatggcttggctcttgggaaccatacatgtctgtgtggttatcacccccttctccatcttaccttgtgttccggagggtggacacttcactattgagggaggagagtctgtttttcaaaatccagagagtcaccagaaagagaactaaattcaccttcagaaaaccacagaagatttgttgaatagattttgaaacctgttatctctttttttttttttttcagacagggtcttgctctgttgcccaggctggagtgtggcggtgcaatctcagctcactgccacctctgcctcccgggttcgagcgattctcctgtctcagcctcccgagtacaggcacccaccaccacgcctggctaatttttgtatttttagtagagacagggtttcaccatgttggccaggctggtcttgaactcctgacctcaagtgatctgcctgcctcggcctcccaaagtgctgggattacaggcgtgagccaccacaccgggcctgaagcccattatctcttcatcctagcctgtctaatatgaattatacacgtaagtctttttcttaaatattgagtaacagtgttgagtttgaagattcaagagtggtcttaggaaacctaacccaacccatgacaacccaggggacattcctgctcttgtcaccatctttattatcttgtttttctaatgaccctcagcggggcagcgaggatgctcagatgatgtcactcacagagaagatggcgcagacaggtccaaggaagccccatataaatcccttttctggttggagccagcagctgaaaaaagagagattaaaaaaaatgcatcagtttttggagatatggaacagttatgtaaatctattccatccctcctcaccacttcctcacttccttcctacgtcaacaatattaagtgtttctttagtgatagggtctgtggttggctctgaagatacagtggtggagaaaatgaacacggtcttagatccccaaaatttcaactcaaggaagatacacacaatcagacacattcaaacaatgaaacaaaaatggaaggttgtgccaggcacagtggctcacaccaggactttgggaggccgaggtgggaggattgcttgagaccaagagcttgagaccagcctgagcaacatagcaagaccccatttctacaaaaaataaaaaaatagccgggtgtggtggctcacacctgtattcccagttacttgggagactgaggtgggaggatcgcttgagtccaggaggtcgagactgcagtgagctgtgattgcactactgcactccagcctgggcaacagagcaagacctatattgcagcattttaaaatggctgaatgaggccaggtgcagtggttcacacctgtaatcccagcactttgggagccgaggcgggtggatcatttgatatcaggagtttgagaccagcttgcccagtgtggtgaaatcctttctctactaaaaacacacaaaaaatgagctgcgtgtggtggcgcatgcctgtaatctcagctactcgggaggctgaggcatgagaattgcttgaacccaggaagcagagagcagaggttgcagtgagccaagatggcaccactgcactccagcctgggtgacagagtgtttctaaataaataaataatgactgaatggtctcttaacgttcctttttatggctgaataacatttcattgtggatatattacgttttgtttattcattcatcagtgataggcattgtttccaatttttgactattctaaatactgcttctatgagcattcatgtacaacatttttctaaacgtttattttaggttcagaggtacattttgtaggtttgttatgtaggtaaaatgcatgttgcggcggtttggtgtacagattatttcgtcaccctggtcatcagcacagtactctataggtcgtttatttatcctcgccctcctcccactctccaccctcaagcaggcttcggtgtctgaagtttccttgtttgtgtccatgggtacccaatgtttagctcctacttataagtgagaacatgcggtatttgattttctgttcctgcattaattcacttagaataatggcctccagctccatccatattgctgcaaaggacatgatcttgttattttatttttttgagatggagtctcgctctgtggccaggctgaagtgcaatggagccatcttggctcactgcaaactccacctcccaggttcaagcgattcttgtgcctcagcctcccaagtagctgggattacaggcacccacgaccacgcccagctaacttttgtatttttagtagagacggggtttcaccatgttggccaggatggtctcaatctcttgaccttgtgatctgctcgcctcggcctcccaaagtgctgggattccaggtgtgagccaccgcacccggccgatctccttattctttatggctgcatcatgtacaagtttttttgtggacatcgttttcatttgttttgggtatatacctgggtcatatggtagctctatggttaacttttggaggattagtgttaatagttcacaaaaccaaaaacggaaaaagaggaagcactttccaaatcttctacgaggccagtgttactctgacaccaaacccagaaatagacatcacaagaaaagaaaactgcagaccaaaatcccttatgaaaatgaatgcaaaaatcctcaaaaaaatactagccgaccaagtcctgcaacatattaaaaggattatataccctgaccaggtggtaattatcccaggaatgtaaggctagtttaacatctaatcatccatcaatgtaatacacatattaatagaataaaggattaaagttatatgatcacattatagttatataattatgtaatcatataattataagatcacattataattatataaccatataattagccatatataaccatataatattccccaggactcaaaggtaaataattaatcatatataaccatataattatataaccatataattataatgtgatcatataattttaatcctttattctattaatatgtgtattaataaaataaagaattaaggaagcatataattatgcttatataattatatgtaattatatatgatatatacatatataatataattataatgatatgataatatatgattatacaatttaatgtgatcatattatttatagttatataatataattatttatagttatataattatttatagttatgtaatataattatttatagttatgtaatataattagttatgtaatataattatttagttatgtaatataattatttatagttatgtaatataattatttatggttatataattatttatagttatgttatgtaattatttatagttatataattatttatagctatgttatataattatttatagttacataattatttatagctatgttatgtaattatttatagttatataattatttatagctatgttatgtaattatttatagttacataattatttatagctatgttatgtaattattcatagttacataattatttatagctatgttatgtaattattcatagttacataattatttatagctgtgttatgtaattattcatagttacataattatttatagctatgttatgtattcatagttacataattatttatagctatgttatgtaattattcatagttacataattatttatagctatgttatgtaattattcatagttacataattatttatagctatgttatgtaattattcatagttacataattatttatagctatgttatgtaattattcatagttacataattatttatagctatgttatgtaattattcatagttacataattatttatagctatgttatgtaattattcatagttacataattatttatagctatgttatgtaattattcatagttacataattatttatagctatgttatataattatttatagttatataatattaatatataaattacatagatatatatttatataaaaattacatataaaataatctaatataattatataattatatgattatctaattatgtgatcatataatttttaccccatataattaaaaattatatgcttcggaaaagcatttgacaaaatcaaacactctttcttcatcaaaataccgaacacatgaggaatagaaaagaatttctttaacctgaaaaagggtatctatgaaaaatcctcagctaacatcatacattaatgaggacagagtcaatgctttctccctaagtacaggagcaagacaaaattgtctgctgttctagtcaacagtgtcctggaggtttcaaccagtgcaattggcaaacaaacaaacaaacaaactagctagaaaagtacctggcacaaagtaagcatctcataaatcttaactatgacaatatcaattattttagttattcaaatcaggtctactttttcaaatgaaaaattggagtatcctaaaagatttagataaagtaggttagatttttaaaaaatgctgtcttgagcactttgatttcattcttactatttcagtgagacagatttaaatgcattatccctaactattattattattttttagagacaaggtctttctctcttgctcaggctggagtgcagtggtgcaatcatagctcactgcaacttcgaactcctgggctcaagcgatcctcccacctcagcctcctgagtagctaggactacaggtgtgtgccagtaggccctgctaattttttaaattttgtaaagaaggggtcttgctgtgttgcccaggctggtctcaagatcctgggctcaagtgatcctcctgtgtcagcctcccaaagcacagggattccaggtgcgagccactgagcctgaccctccttaattattataatcttctagcagaaagatgccctagggattatgacatagtgtctttgtcctattcgtgctttccaaaggcttgccctttatttcattcagaaaatttccgaaaaccctcttctacaatgcctagcttgaaatgtaattgaaataaactcaatagctaagaataaggagctgcagtgtaatccaaccaatagagcctaaaatccctactgatctaattaaaagcaggtgtcataaaaatgctatctaggttctagcaatggccatggttatgccggagaagataaggattgtgagaatttgcactaaccgggaaggtgttccataaaggtgaggcctggaggctgcagaaatggccactgtcacagctgggactccgtagcccacagggaacatgagcttcttcatgaatctgttgatgcttgagtagttgaccaccgtcaggttccgtgcagtgaggaagaggtacagggcctccagcagcatccaggtcaaggtggccaggtagagatagtgcaaggtaccggcgatgatggagcacagcacctggcggagaagtaaaagacgcccagagcggcgatcagatttgagtgtggcccatggcttctcctgtaccatgttgttggggagaattctgagatatttgatggcattatagagaatatttgctgtgtagttgagtcaggcaatgggaaattggtggtgttctcttctaatattccccaggactcaagggcctatatatatatacgtgtatatatacgtatacacacacacacacacacacatatatatatatatatatatttttttttttttttttttgagacggaatttcactcttgttgcccaggctggcatgcaatggtgcgatctcggcttaccacaacctccacctcctgggttcaagagattctcttgcctcagcctcctgagtaactgggattacaggtatgcgccaccatgcctggctaattttgtatttttagtagagacggggtttctccatgttggtcaggctggtctcaaactcccgacctgaggtgatccgcccacctcagtctcccaaagtgctgggattacaggcatgagccaccacgcccagccgggctattatattaaggaatcaaatgccgcatcattccatgagccagcgtgtcctgcgtcaaggaagggagccctctggaacaccgctgtcaataccttgtgtccggtttgatcaattgccacgaggaagaggaggtgggccaggaagaggcagagcgagagctgcagatgcagtgaggtgctggtgttctggatggctttacacaggagaaaagtgagggccgccaggaggaggcacagcagagagacgctcagccccatgtaggtgatgacagtcagcacgggatcctcctcctgggacccggaaaagaagagttcacagtgatgctttcctgctctggggtaatgaccccaccaccatttaaaatttttactttggcatagcacattcaagaatgagggagccaggtaaatttgtgaagatgtcaccaatttaatttaatttgcgaaggtgtcacccgagcctcatgggtggctaggaatacaggcgtagtcatgtaggtgacaacgggtgtgcattatagtcatgtatggcaccatgccctgctaatttttttttttgacagtcttgctctgtcgcccaggctggagtgcagtggtgcgatctctgctcactgcagcctctgtctcctcggttcaagcgattctcgtgtctcagcctcccaagtagttgggattacaggcacgtgcctccatgccaggctaatttttatacttttagtagagacagggtcacaccatgttggccaggctggtcttgaactcctgacctcatgatccacccgcctcggcctcccaaagtgctgggattacagtcgtgagccaccacacccgtcctaattttttttttatttttgtagagacagggtctttctgtgttgcacaggctggtctcgaattcctgggctcaagtgatcctcccgtttcagcctcccaaagcacagagattccaggtgtgggcccgttaggttttgaagggaaagtgagagttaaagaaagacagagagttggcagctctacagcaatgcaggtttatgtccagcaggagacttgtggaggggggagctagcttcgtgccagaacccactgccgcttacaggctggggtaattacaggtctgggcgggaggggctgggcggtatggcttgctgcctgggaggatattgataagatgttcctgtcatggaaaacaaaagggtggtttggccctttctcccgcaggatatgatgatgatgtcccttggatctactctaagtgatgagataagaaagtcaggtgggcgaggtgtggtggttcctgcctgtaataccagcactttgggaggccgaggcgggtggattacttgaggtaaggagttcgagaccagcctggccaacttggtgaaaccccatctctagtaaaaatacaaaaattagccgggcatggtggtgcatgcctgtagtcccagctactcaggaggctgaggcaggaggatcccttgaacccagaaggtcaaggctgcagtgagctatgactgtgccactgcactccagcctgggtgacagagaccctgtctaaaaaaaaaaaaaaggcagagtttaccctgggtgggccagacctaatcagatgagtctttataagctctgggctcttcctggagaatcagattcaaaacttgtgacggttaatactgggtgtcaacttgattggattgaaggatacaaagtattgatcctgggtgtgtctatcagggtgttgccaaaggaaattaacatttgagtcagtggactgggaaaggcagatccactcttaatctgggtgggcactgtctaatcagctgccagcgtggctagaatataagcaggcagaaaaatgtgaaaagagagactggcctagcctcccagcctacatctttctcctgtgctggatgcttcctgcccttgaacatcagactccaagttcttcagttctgggactcggactggctctccttgctcctcagcctgcagacggcctatcgtgggaccttgtgatcatgtgagttaatacctaataaactcccctttatatatatctatatctatctatatatatagatctctctctatatatctctatatatgtatatatttgagtcagtgggttgggaaaggcagatccactcttaatctgggtgggcaccatctaatcagctgccagcgtggctagaatataagcaggcagaaattatctatctatctatctatctatctatctatctatctatctatctatctattccattagttctgtccctctagagaacctcgactaatacaaagcttaagagggattctgcgtgaggaaatttttttccttgtcctccagataggaatgctagaagtttgccagagggtcatgtgagaagggatatgagtggcctctaggaactgaatgtgatgccttcctgacagctaagaaagtgagacttcagtcctacaatcacaagaaactgaattctgccagcaaccagggagcttggagaaggacctcaagtctcagatgaaatggcagccctgggggtggggtgacatgatgatttcagtcttgtaagaccctgagcagaaaagccatcttgctatgccagcttgctgacccagagctgtgagataatgcatatatttttttaaaaggctgctacgtctctggggatttgttacacggcaataaatgcagagtgcatcccctcctaagggtctcacctgcacatcgtagtgggccatgaggacggcaaagctgctcaggtgggtgcaacggcagatggtgctggtgtctctggtgcctattgtgctgcagcctgtggtggcccagtgaccacatccattctggccatgctcccagaagacacagagcaccttctgtctcgggatcactgactgcaggaacagaacacaggtgtgggctgggcatggtggctcacgcctgtaatcccagcactttgggaggctgaagcaggtggatcacttgaggtcaggagtttgagaccagcctggccaacatggtgaaaccccatctctactaaaaaaaaaaaaaaaaaaaaaaaatacaaaaattagctgggcgtggtagcacacacctgtagtcccagctattagggaggctgaggcaggagaatcgctcgaacctgggaggcggagactgcagtgagctgagatcgtgccactgcactccagcctggctgacacagcgagactctgtctcaataaaaaaaagaacacaggtgtgagctggtgggtcggatgctcagaaatgcttacccaaagccggcttgggaaggactgactttcctggggagataatgtacccataacagagacccctgagccccagggctgagctgagcagcaaggctatgcccggactcagactattcacccaccaaccaactccaccagcactcacacggtgggagaaggtgaaggtaactggggagctgaggttttgggtgtcgttgttgctcagaaaggcagagatcacatctgagagcaggatgggggagccgtcctgcagcaagccctggtgtgtctcatgcagaagcatctgcttctcaggttccaggaccagaggggcctcagccagcaacttgcccatccctggaatggagacaaggcccaccacagaagggcctgcagggcgaggccaaggttgaatcttggagtaggttgaatctctgggtccacaccagagttcctctgccctgcacagaactttctactcagatgggctaccttcctttggcttcacccctcccacactttccttcaatctttagttctatgtgtatcacatcctgcaggacaaggccacggttaatatctcagggtccccaacaaggtccgttcctcctcagctggactctcctcttacagccccactccaaacatcccacacttccctttaatctttaaatttcttatttttcacattcttgggcatcttttcccaccatgaagcttcactgaccacctccccatctcagccattacctgggtcaccagatttctgtgcctgattccagtcgagctgcatcactgcctgattctgtctcaaggtgacactcctgtctacttgcttctgcacctccagggacaattctatgagttgtgggaattacataaggggggttaggttaggaatcgtgcctgcagtggttgatatactatgacttaatatatatactatatacatatatagtctgaagttacaaaatatcggaagagaatagtgtgagcaactgtatatctacaaagtaggtaacctagatgaaatggacacattcctagtgacacacaaaccactgaaatcaactcaagaagaaatagaagatctgaacagacctataacagattaaatcagtaatcaaaacctctcaaaactaacagcccagaccagatgacttcactggtgagttctaccaatagcttaagaaagaatgaacatgaatcttttacctttttaaaaatatggaagaggaggaaacactatttaagtaattttatgagtctaatattgctctgataacaaaaccagatgaagacatcacaagaaaataaaattatagaccaatatttcttatggacatagatgcaaaaattttcagcaaaaatgttaggaatacattttacgaaggagactcaagacttataggaaagttttttgagtatttttttttttttgagacaaattctcacctgttggtcaggctagagtgcagtggcatgatcatagctcactgcagtctcctgggctcaaccaatccttccacctcagcctcccaagtagctggcactacaggtgctcactaccacagccagctaatttttaaattttttgtggagatcatgtttcagtatatttccaaggctgggcttgaactcctgggctcaagcaattctcccaccttggtggcctctgacaatattgggcgtgagccactgcttctggcctacaaaagtgtttgaaagaaataaaaggccctctctaaatggaaagacagcctatgttcatggattggaagactttctattgttaagataacaatactcccccaaagtggtctagagactcaatgcaatccctatcaatattttagcctattattactttgcagaataagaaaagttcatcttaaaattcatatggtgttgtaaggaatccaaatacccaaaaacaatcttgaagaagaacaagaaggttggagaattcacactacctgattccaaaacttactacaaactgacagtaatactggcataaggacacaacagaatagaattgagagtccaggaataaacccatccatcttatggtcagttgattctcaacaaggggtgccaagactatacaatgggggaaagaataatctcttcaacaaatagtgctgggattactggatagtaacatgaaaataaggaagttttaaccctaccctcacacaacaaacaaaaattaactcaaaataagccagtgacctaagcttagaagctaaaactagaacacttaggaggaaacaggggtaaatcttcctggtcttggatgcggtaatgaattctttttttatttttatttttgggacagagtcttgctctgtcatccaggctggagtgtagtggcacaatctcagctcactgcaacctccgtgtcccaggttcaagcaattctcctgcctcagcctcctgagtagctaggattacagtcatgtgccaacacatctggttaattatttttatttttatttttagtaaggacagggtttcgccttgttggccaggctggtctcaaactcctgacctcaggtgatccgcccacattggccttccaaagtgctgggattacaggcgtgagccaccaccccctgtcaatgaattcttaaatatgacaccaattgcacatgcaacaaaagaaaaattagataaaataaatgtcttcaagatttaaaacttctattcattaaagtgaaaagacaagaaaatgaaaagacaatctacagaacgggagaaaatattttgcaaatcattcatctcagatgatctactatcagaatgtttaaagaatgcttacaactggacaaccaaaagacaaacagcacaattaaaaataggcaaaggatttgaatagacatttctccaaaaatgacatgcaaatggtgagcaaacacatgaaaagatgttaaacatcattagttatcagggaagggcaaatcaaaaccacaatgaggtatcatctcactagtgaagtggtgtaaatacccaagtttcactgtttcacaccagggaaattgaggatgtggacacataagaagttagtttaagagtggagatttaataggcgaaagaaaaaaagaatagctctggctgggcgcagtggctcacgcctgtaatcccagcactttgggaggctgaggcgggaggatcacgaggtcaggagatcgagaccaacctggataacacggtgaaaccccgtctctactaaaaatacaaaaaaattagctgggcatggtggtgggcgcctgtagtcccagctactccggaggctgaggcaggagaatggcgtgaccccgggaggcggagcttgcagtgagccgagatcgcgcccctgcactgcagtctgcgggacacagcacgactccgtctcaaaaaaaaaaaaaggaaaaagagaataactccctctcctgcagagagacaggggctcccaagtgggtcttccggttgcgtggtgaaatgcacgaagttttatagatgagcttgggtaggcggtgtccgatttacataaggcttaaagattggtctgaacaggtgagccatttacatacagcatgaagaaactggctgccccagcctaatcttttattatgcaaatggattctctacctggctggctccacgttgcctgcttctgtactgtacacgtggttgacaaagataaaggaagagggagcccccacgttgaacatgtcgggcccccaggtaaccttttcctattggcacagctgccggcattcacccgtgcaagcttccagcttgcttttctatgtctgcagctcgaattttcaggctgctcgttattagaaaagaaatgatttgggggctggtttttattaaaagggaaaccttactgaggactctctgacccttgctaactgcctaaataatttctttttcactcctgtatcactgggatgaagagaggtgagttaacaggtagagacatacagttagacaaaaagtataagttatacatatatatatatatattttttttttttagacggagtctcactctgtcacccaggctggagtgcagtggcacgatctcagctcactgcagcctctgcctcctgggttccagcgaatctcctgcctcagcttcccaggtagctgggattacaggcacgtgtcactaagcccagctaatttttgtatttttaatagccagggtttcaccatattggccaggctgggctcaaactcctgatgtcaggtgatctgcctgccttgacctcccaaagtgctaggattacgggtgtgagccaccaagccagccacctctccgcttattaagcagatttttttttttttttttttttgagacggagtctcactctgtcacccaggctggagtgcagtggcaccatcttggctcactgcaagcttcgcctcccaggttcacgccattctcctgcctcagtctcccgagtagctgggactacaggcacccgccaccacgcctggctaattttttgtatttttagtagagatggggtttcaccctgttagccaggatggtgtcgatctcctgacctcgtgatcctcccacctcggcctcccaaagtgctgggattacaggcgtgagccaccgtgcccggcccaagttctattgtttgacagcagagcagagtgactataattaacaagactgtatgatgtatttcaaagtagttacaaaagaggacttcaattgttcccaacacatacaaatgataagtactcaaagtggtggatacctgagataccctgacttgatcgttacacattctaggcaagcaacaaagtatcacatgtacccataaatatgtaagatttatgtatcaataaaagcaattaaaaacagaacaaaagaaaacggaagtaacaagttttgctgaaggtgtggagaggataacccgtgtatgtttctggtggggaattagaatgatgcagctgctttggaaaaagtttggtggttcctccaaaagctgaacatagaattaccatatcacccagcaattccactccttagtatataccccaaagaactgaagacagttattcaacccaaaatgtgtccactaatattcataagagcactattcacaccagccatctaaacaaaaaaaaaaaattcgaagtcctctcccgcccccctcaaaaccatctgaatggacttcctttttggccagggcactctaaatttaactggaaagactagttcaggctatggtgggaagtggggggtctgacatgtgtcatgccctcctcccttttggagttgaggaaaagctgaccagcatttaacataacacagacctgaagcttaataaggaacatttaccatctattctctctgaagcctgatacctgaagagttcatctggatgatacaacttcagcctttacagccccttatcgtattccagacattcttttctatggataataactccttcaaccaactgccaatcagaaaagcttaaatctacctataatctggaagcacccgccccacacctccacttcaaattgtcctgcatttctggactgaaccaatgtatagcttaaacatatttgattgatgtctcatgtccccctaaaatgtataaaaccaagttgcgggggcaggcgtggtgtctcacgcctgtaatcccagcactttgggaggccgaggcaggcggatcacgaggtcaggacatcaagaccatcctggttaacatggcgaaaccctgtctttactgaaaacacacaaaataattagccgggcgtggtggcgggcgcctgtagtcccagctacttgggaggctgaggcaggagaatcgcttgaacccgggaggtggagtctacagtgagccaggatcgcaccactgcactccagcctggttgacagagcaagactctgtctccaacagaagacaacaacaacaacaatcacaacaagctgtaccacgactaccttgtgatatagaagttaaaaaggaattatttaggcagagagtgtgggtaaggaagtcctgggtaagtctttccttttaatgaaaatcagcccctatatcattttttttttttctaacaaagagcagcctgtaaaatcgagctgcagacataggcaagcaagctggaagcctgcacaggtgaatgctggcagctgtgccaataggaaaaggccacctgggactaggcatgttgaaaatggcggctccatcttcccatctctttgccaaccacgtatacagtaaggagctggcgaagactccatttgcataataagattagggtggggcagccagcttccctgcaccttatgtaaacgtcacacctgttccaaccaatctttgggccctatgtaaattagacactgcctcctcaagcctgtctataaaatccggtgccctctggcatgggtgggaagtcccatttgggcattcctttctctcacaagagagagagttgttctcctttctctttcttttgcctattaaacctccactcataaactcactcctggtgtgtgtctgtgtccttaattttcttggcatgaggcaatgaacctcaggtattaccccagaaaacaacaccacttcacttgggaatatgttctcaggggctcctgagggctgtgtcacgggccatggtcagtcatacattcatatttagctcacaataaatctcttcaaatattttacagagtttgactctttttgtcaacagccaaaaggtggaaacaacccaaatgtccatcaatggatggatggataaaaaaaaaaaaagtgatgtattcatacaatagaatagtattcagccatgaaaaagaatgaaatattgataaatgctatggcatgcatgaacctcaaaaccattatgctaggtgaaaggagctagactagatggtcacatattgtatgattccatttatgtgagatatcctgattaggaaaatccatggaaacagaaagcagattagcggctgccatgggttggaggaagggaggaatgaggagtggttgcttaccatgtgcagtgttcacttttgggctgatgcaagcattttagaaatagaggtgacggttgtataactttctgaatatactagattctaccgaaacacacgcttttaaaattttttcttatttttatttttaattttaatttttttgtttgagatggagtggcactctgtctcacgtagtctggagtgcagtggtgcaaacttggctcactgcaacctctgcctcccaagctcaagtgattctcctgcctcagcctcttgagtagctaggattacaggtgtgcaccaccacgcctgtctaatttttgtattttcagtagagatggggtttcactatgttggccaggctggatttgaactcctgacctcaagtgatccacccatttcagcctcccaaagtgctaggattacaggtgtgagcgcctggcattacaggcacgccccacgtgaaacagacactttaaagtggtgaacttgatgttatgtgaattttatcttaataaaattaatgctatatgcattttcatgctttaaaaattattatgcaggccgggcgtggtggctcacgcctgtaatcccagcactttgggaagccgaggcaagtggattatgcacaaggtcaggagatcgagagaccatcctggctaacacggtgcaaccccgtctctactaaaaatacaaaaaattagctgggcgtggtggcgggcacctgtagtcccagctactcgggaggctgagacaggagaatgctgtcaacccaggaggcggagcttgcagtgagccgagatcacgtcactgctctccagcctgggcgacagagtgagactctgtctcaaaaaaacaaaacaaaacaaaacaaaacaaacaaaaacaaacaagaaagaaatcatacttagagatcaaatgatattaatttatagtattccaaattaaataaattgttctcttttgaagtgatttctattttgttattttaaattcttcatcataattatttactgctgataattcatattacaatgaaaatgcatgttatttatgcatttctttttcctttcctttccttctttctattcttccttcttcctctactcctctcctcctcctcctgtgctcctcctcctctcctcctctcctccgctctttctcgtctcctcctcctctcctccttctcttctcctcctcttctccttctcctcctcctatcttcctctgcctcctctcctcctccattcctcctccttctcctctcctcctcctcctctcctcctccttttctcctcctcctctctttctccattcctcctcttcctcctctcctcctccttctctcctcctcctctcctccccatcctgtcctcctcctcccgtcctcttcctcttgtcctcctcctcccatcctctttcctcctcttcctcctcccctcctctcctcctgtcctcctccttctgtcctccccctcctgccctcttcctcctttttcttcctctttatcctcctcctcctcttcacctcctcctccttctcttcttcttcttcttcctcctcctcctcttcgtcttctcttttttgagatggggtcttgccctgtgaaccaggctggagtacagtgatgcaatcatagttcactgcagactcaacctcctgggctcaagcgatcctctcacctcagcctcccaactagctggggccacagttgtgccatcacatctgtctaatttaaaagatttttttttttttgtagagattgagtattgccatcttgtccagactggtatgtatttctttttaatctcttattttagtttgtcgatgagagtaacactgatatacaggtgtggtcacttggctctggtgggactgggaaaggaaggagacagaaaacatgcagagctggagtctggggcagacccagggacctacctgtgcctgcaggataactgaagttcaacagcccattggaaaggttcttgctcaggcctctgaggacatcctctaggccatccagcaggtgactggccacacagtgctgctgtaagcggggcagggtctccaggtccccaggggcctccagcagctcatccagcgcctgtaagatgctctggagggatgtggacacagacctagtgagccatgggccagagggcccgcatgaagactccaaccgctcagccccagggaacagatcctagagactgtctatctgggggatgaagatggcattggcggctgggcgcggtggctcacgcctctaattccagcactttgggaggccgatgagggtgggtcacaaggtcaggagatcgagaccatcctggccaacatggtgaaaccccgtctctactaaaaatacaaaaattagccgggcgtggtggcgtgtgcctgtaatcctagctactcagggggctgagggaggagaatcgcttgaacccgggaggcagagactgcagtgagctgagatcgggccactaaactctggactggcgacagagtgagactccgtctaaaaaaaaaatgacattggatgggattccctaggtgatccttgactctggttatggcccctcagaggccaacacttctgtgcaatatcaatgctgacctaaacccaaagtccagggaaagcaagaggaaagatattaagtgcacttgggtgtccattagcttccaccagccctgaaagatgctgggagtcagaccagcacccactgcattgggtcctgtcccctcccagacccaaactgccccaggcctctgtgggatgcagccaccttcctgcctcgcccccttgccctgggtcctgtccttacctggatggtgttattggccaagcctggcttgtagtctctgcccaggtcctggactttgtcgaagaatcgggaaagcgtctgcagagagaggagatgtgggggtcagagagcctggacggcgggtgggaagtttagaacaaggagacggatgcagtgctgtgtggatggagttcccgccgcctcgtccctgtgggggccactcacctggctgtggactccagggggcggggtccaggtggagaaagtcatatctgtagggaacaagacaagcggctcattaggcgggagcgtgtcagtgtgtgtgctgggggtggggagcttctagggccaggtcataccttcacagacagtgtccttttggttattcgggattccgtgtctgggcttccagcctgggcggcagcggcagctgtatgaacccacggtgttgaagcagacggtggagctgtcacactgatgctgcccggagctgcactcgtccacatctgaggacaggaagaagggggtcaggtcctgtcccagcctggagagggtcctgtctcctgtctgtgcccccagctcgttcctcccggcattagtgccccccttggagaggtggacgctgggttatggaagcgtggagaggcctgggcacagcaggtgggccccgtgcagatgagcaggttatgaatatggtgaaacgccttcctcccagtgagtcatcagctgttgcctggggtccccctgagcctcccccctcagtaccccagctccttccgcaggacccttgctcttttctcatctagcctcagaagaatgaacgcctgacacagtcgggcgcctccagcgctcattctgcttggtttgtgtgggcgccgttgaacatgtgatcagatgtttgtgggtctctgggaacgtgggatctgagctctcgaccttcacagacggtattgtttgggccattgggggaccccggaatcggttgccagcccgggcggcagcggcactgatagctgcccacgttgttgaggcagtgggtggagctgtggcatgggttttgtccggaggtgcattcattcacatctgaggacaaagccagagggtcaaaccctgtccctgaccagcctgggcctgccctccactcactgcacccactcccctatcttttcattgcctcagactgaagaccattattgcacgtgccaccacttggtgaccttcaacttcaccttcaaagcatcttatgatggtcttcctaccagatgggcacagcagggaccatggtccccagtttataggaggtgaaaccaaaagggaaactgagtcatgggagctggactttctgactaaaatctctctcctgctccctccctcactatggtggaggttccccttcttagaactggaagtgacaccttcttccactcgcacgtgacagatgaggaaggggtgaggtctgggggcccacaagggcactccaagccctgaaggccctgccgcctccctgccgtgtggcgagtccttcctgggaggtgaatccttaggcaggggcttagcaggtccttgaccttgtgggaacctgcggatcttctccctcctcctcggctgctttggaggacctgactcagctccatccccagctcccgtccagcctcacagcgtcttcctggggcctctacctgtgcagagcttcgggtcctcaggtttgagcttgaagccaggcaggcactggcacgtgtagctgccgagggtgttgacgcaggtgccgtagcttttacagagccttgggttctgctgacattcgtccacatctgcaagaggaaggagagggtgaagaatgcccgtagctgtgagcagctttcggggctgagggtccgccatgtttcctggcacggaagcatctggaaggcaccactgtctgctcccttttcttttctttctttcttttttttttttttgagacggagtcttgctctgtcacccaggctggagtgcaattgcctgatctcaactcactgcaacctccgcctcccgggttcacgccattctcctgcctcagcctcccgaatagctgggactacaggcgcccgccaccatgcccggctaattttttgtatttttagtattagacggggtttcaccgtgttagccaggatggtcttgatctcctgacctcgtgatcagcccacctcggcctcccaaagtgctgggattgcaggcatgagccaccatgcctggccatctcctcccttttctaatccacacagaggtgtcccatggtgagcatggtggcccaggccttctgttgttcagatatggctggaagcatctgagtcctccccatctcccctgcctccctgggcagctcccagctggggcagggatgtcccagcctgaggattcaggacaaaggtcagggtgggattttcttgggaccaagtgcagggggcatgctgcttgcccaggtaggacctgtcttggttcccagtggcagtcctgggccaaaggacagagccttcctgtgaattggaaaaaggcatctcctcttcaagtagtcacagtcatatttgaggaatggagagtaggcaggttttcagcttctgctcaccctcttggctgggcatccatatgcagtcagcagcctatgcaactgtacatggtggtcatgggtccttctcagtgagaaccctctggtttagtccgttttgtgttgcaagaaaagaagtttatttggctcatggttctgcaggctgtgtaagatgcatggctccagcatctgcttctggtggccttgatttccccaggacagctgctcactggctgagttatcagaatcccggtggccctagcaggatggtgctctcccatccacactagctctgagagcccagctccaggcacatggaccaagactggcccctgagccagtccccaggggagcatgagtctggtgctgcataggccagggctgcctggacagtgggtcccaggccagggtggacagtggggaccgacatacagctgggttgccccagggctgtgaaggtgcctttttttgatcctcaggaaggtgtcttggaaatggcaggatgtagtgagaatccatagctgagaaagactggccctgggtgaaggtttagtggctggagaggggcacagatgctgatgggcaaagatggaggtgtatctgtcatctcatctcttggcattccaccagggacacagacctatttctgaatggttccactcccatgggatctgggttgacctcctgggagaggatcaggcttggagcaatggccctgatgttaacctctcttgccattgggtccacactagtgcctcttccattcactcaactctccaagtatggggagtccatgtcactgtgcccaccgttagccacaacatcctccagtgcactcaggtggaccaaaactatcaggaagggtcagggcagtctcgctcagtgaaagggacagagactgagtggcagaaaaagaggtcagggctccacgaggcatcttctccaggtggggttgttggccagtggcaggttcgactggggacagtggccctgccttcaaatctccctcctccttcatttctggacagggtgcctgggtccatgatgagctgggggatcagagagagttccaggtgagcagagctgtgtggagactgtctcatcctggcagtcgctgatgatagcagagagaatggatactgcgctggaatgcaccacgcagtgagctcatcgaatatcctgagtgccagccccctttttgttttgtacaaataagataccaggtcggacatggtggctcacgcctgcaatcccagcactttgggaggctgagacgggcggatcacttgaggccaggagttcgagaccagcctggacaacatggtgagacaccccccccccatctttactaataaaacaaaacaaaacaaacaaataagatgccagatgggcagggggatgttctgagcttttggaagtgaccctctgtggagggttctgaaccttgaggtttggatagcgacaggtgaccaggtgtttgggacggccctgtgatgcctggagtaagtggggcaaggagctgagggagtggccccaggtctcctgcctatgaggcctgtgacaccaggtagacaaaaaaaacaagaatgctgaggggtgagggggatgcagacagggccccacggagcccttccctgagctgaggcttcaagaggcaggtcctgctccgaactagcaggctgttctgtgcggatggggtccatgagagccctctcccacttcattcctgctcatctgtgtctctgcctatccaccaactaagccccctctctcagtgttggcctcttttcttttctctcttctcttctctccttttcttttcttttttttggagacggagtctcgctctgtcgtccaggctggagtgcagtggtgccatctcggcttactgcaagctccgcctcccaggttcatgccattctcctgcctcagtctctgattagctgggactacaggcacccaccaccacgcccagctaatttttttgtatttgtagtagagacggggtttcaccatgttagccaggatggtctcgatctcctgaccttgtgatccgcccacctcggcctcccaaagtgctaggattacaggcatgagccactgcgcccggccagtgctggcctgtttctaacatggcaacacacctcctcaataattacaaacaccacctgtgcatgcggtgatacagtttggatatttgtcccctccaaatctcacgttgaaatgtgatccccagtgttggagatggagcctcgtgggaggtgtttgggtcctgagtgcagatccctcatgaacatctcggtgctgtccttgggtcatgagtgagttctcgccttgttagttcccatgaaaactgcttgttggaaaaagcctggtatctcctcccttctctcttgcttccttcctcttgccatgggatgccagcttcccctttcccgtctgccaagagtggaagctccctaaggccctcaccagaagcagatgctggagccatgtgtcttacatggcctgcagaaccatgagccaaatcagcttcttttctttatacatgatccagcctcatgtattcctttatagcaacacaacatagactaaaacagaggctctcactgacaaggacccatgaccaccacgtacagttgtgtaggttgctgactacatatggatgcccagccaaggcggtgagcagaggctgaaaacctctccattccccaaatggggctgtgtctacctggagaggagaggcttttctgtttctctttttctttttgtttctttcttttcttttttttttttttttttttttttttttgagacaaagtcttgctctgtcacccaggctggagtgcaatattgagatcctggctcactgcaacctctgcctctgggttcaggtgattctcctgcctcagcctcctgagtagctgggattacaggtgctcaccactatgcctggctaacttttgtattttttagtagagatggggtttcactatgtttgtcaggctggtcttgaactcctgacctcaggtgatccacccgcctcagcctcccaaagtgctgggattacaggcgtgagccactgtgcctggcccggagagtcctttttctaattcacaggaaggctctgtcctttggtcaagatatgtgcatgcaatgtagcatctgttcacaggggacccctgtgaaccagcccccctgctgggctctatgcagctgcgtgctctcagaacgtacacctctgctctgtcctcactttcctcccaccagggaggctctactgactgcagggagaacaggagggacagggctgggaacaggagcactgccacttttctctttacagcagggcaggtctgctgaacccccttaatgtcccctgggacccttggctcagcctcagcttcttcatttcctgcctttgctcaccttcccttcccactctgtgtactctgtgttaatctcccttctctgtccacctgctactggttcccatctggccttgcagatgtctgaagctccctcccgcacccaactagttcccactggaaagaaggcaaagcagagtgatgcatgggggcctggcttctcatgggctggagctgcagtgtggaataagaccatggcaagggatgaggcaggctgtgtcgaaatagatttcttctgagtgccagccaggagtgtggccccacaggagcccagcttgtctgaacaactcctaaaaggcatccattgcttatttatttatttatttatttatttatttatttattttagatggagtcttgcactgtcaccaggctggagtgcagtggcacgatctccgctcactgaaacctccgactccctggttcaagtgattctcctgcctcagcctcctgagtagctgggattacaggcacccaccactgcacccggctaattttcgtacttttagtagagacagggtttcaccatgttggccaggatagtctcgatctcctgaccccgtgatccatccgcctcggcctcccaaagtgctgggattacagtgcataataacgtttaaagaatgaagatgcctgtagcacctgctgtgtgctgggctctgttagaagcacctattctttccttggtcctcctagaaggcataggagtaggccattattatcatcctcattttatagatgggtaaaccaaggctctaagagcagtagtgatgttggtaatatcatttaggtaacaggtggcaaagccaggatttgggcccaggtagctggtcccagagttttcccttggccttcacaccacgctgcctctctgggctggcgaaacaggtacatgcacacctgtctcatctcagactccaggaactgaacctatacttgggtacctgctccctggatgctgcagaaacagctctggtgaccccaaacctcatggacagtggtgatggaggatgtggggtggttcttaccttgacacgtgttctcgctctcattcttgaatgtttttgccccagaaacaggctcatatcctgggctgcacacgcagtcgtagctcccctctgtgttccagcagtccgagaattttccgcatgacactttcgacagtgttgcacactcgttgatgtctggaacacaacaggacaggaggtcatctcccaaagatgtgagttccgtcagggcagagacccccgtcctgactccccaacatggggcctgctgcttagtatcttttggaaaggatctcaagttgcactgcacaggctatgctgcagctggagcaggccattcctgaagaccacacttgatctcagttctctggctggcatcctagatttggacacagtggacagtgctgaggtgggggatggacaggaagcgccatatccccatccccagtctttttgtagaaatttaaaccccatggcagccgggtgcagtggctcatacctgtaatcccagcactttgggaggccgaggccggcagatcacttgaggtcaggagttcgagaccagcctgccaacagggcaaaaccccatctctactaaaaatacaaaaactagccgggcatggtggtgcatgcctgtaatcccagctactcgggaggctgaggcagaagaatcgcttgaacctgggaggtggaggttgcggtgagccgagatcgcgccactgcactcctcagcctgagcgacagagtgagactccatctcaaaaaaaaaaaaaaaaaacaaaaaaaaaaagaaaaaagaaaaataagggagaaaaaaaaacctatggccagaatgtacccccttcccagtcttaacggtaaactgaggcacagactccagattcctgagcacgcagcttctctctctccaggaagccatgcctattcacttcttacttctcccccttcatattttttcctttttcctcccttccttccttccttctttcctccctccctccctccctcctttcctttttctttccctccctccctctctctctttttcttttcttctcttttctttctctccttctctctttctgtcttttttttttttttttgagatggggtcttgctcctgttgcccagacaatccctcccaaagtgctgggattacaggcatgagccaccacacctggcctctttctttgtttctttctttttcctgagacaggatctcactctgttgcccaggctagagtgcaatggtgcaatcatagctcactgcaacctcaaactcctgggctcaaacaatcctcccgcctcagtcttctgagtagctgggactccagatgtgtgccaccatgcgcggctattttgtgtattttttgtagagacagggtctcaccatgttgcccaggctggtcttgaattcctggcctcaaatgatccacccgcctctgcctcccaaagtgctgggagccaccacacctgccctctttctcttttctctggccatgatgatagtctggaaggtaaggctgtggcccctcacaacaacctctgtcccccactggcactgggctatgcctcataatcgcagatgtcccctgcgctgccctcaagcctctgtaccgtcacaagtctccatgggggtggtgatgatctcagaaaaagagctgaaccctggattgcagcgacaggcggtggcattgacacacgaggagtcctgagggcaccaccgggcacagcctgcaagagcagggagcacggtcagaaggtgaggggtaagggaatacacaaaaagggggcactgggggagatggggcagagcgctgagtttcccgtgcacgagccctctctttccctgggctgaagggggctgggcgggggtccaggaccctccccaggctctggctgtggactgtgctttctgcttcccagcagactcacccctggagtcctgggtttcagctcccggcagagtcagccagacacagaatgctgcaacagagaaaggaaagggggtcagaggggatcccagggtgggaaaggaggcgtaagggtgatgcactttgtgggaggaggatgctgacccctctcaggctcagatcctgcccatcgttcaaacagagtgagcagatgtcacgtcccactcggatgctcaaagccagagagtctgtcaccctgtcctcatgggggtgggttttgttttgttttgtttgacacagggtctctctgggtcacccaggctggggtgcagtgatgcgattatagctcactgcagcctccaattcctaggctcaagcgatccccctgcctcaccctcccgagtagctgggaccacaggtgagtaccgccatattttaaattttctttctttctttttgagacagggtcttgctctgtcgcccaggctgaagtgcaatggtgcgatctcggctaattgcaatctctacctcctgggttcaagcaattctcctgcctcaacctcccaaatagctgggactacaggcacccaccatggtgcctggctaattttttgtatttttagtgagatggggtttcaccatattggccaggctggtctcgaactcctgacctcaggtgatctgccggccttggcctcccaaagtgctaggattacaggtgtgagccacggctcccagctcaaaaattttaaaatgatttatttatttttattatttatttttttttgagatggagtctccctttgttgcccaggctggaatgcagtggtgcaatcttggctcactgcaatctccacctcctgggttcaagcggttctcctgcctcagcctcttgagtggctgggactacaggcatgacccaccatgcccagctaatttttgtatttcttaagtagagatggggtttcaccatgttggccaggctggtcttgaactcctaacctcaggtgatctgcccgccttggcctctcaaagtgctgggattacaggcatgagccatcacgcctggccaaaaaaattaaaaataatttaaaaagttattttagagacagagtcttgctctgttgcccaggctgatcttgaactcctggcctcaagcgatcctcctgcctcagcctccctagcttggcttgggggtggggtttaaggaactgaggagtaggaaagggccatgagcctggtgggggtctcagctccagctgccgctcttctgacttgggggctgtctggtgtgcctgagcatttactgccatcttcatttctttagataaaaatgaaggcatggtcaggcacggtggctcgggactgtaatcccagcactttgggaggccaaggtgggcagatcatctgaggtcgggagttcgagaccagcctgcccaatatggtgaaaccccgtctctactaaaaatacaaaacattagctgggcgtggtggcagactcctgttacccaactacttgggagattgaggcaggagaatcgcttgaacccaggaggcggaggttgcagcaagctgagatcgtgccactgcactccagcctgggcgacagagcaaggctccgcctcagaaaaaaaaaaaaaaaaatgatggcgctggatcccccaggctctaagatgccctggaaccgcatgcttcctcagggacacaggtgcacacacaccacaaccgccgccagccctggcggcccatcctgaaacccagtggtgatatttcaccccgggcgcccctcccacaggaaaacgctgtggccgcctgttggggtgcatgtggcgctgcggttcccagcactcaggaagttcccctttccaaggcatgtcctgggggaccctcctcaggtcaccaggggctttagagatggggacctagggatctccttgttgttcaccagagagagagacaaagaggcagaggtagagagaaaacggagattagggagatagagagactgaaagagagacagaaggagaaagacagagagagagagagaaagaagggagaagctgggggtaccctgcagtggagaagtcctggcctctattttccccgccccccgcccatgtctttctatgcgctatattaagagcagtggctctggggtcctagcactcactttttgcccctttccttcccccgtgcctcagtttcccctcttatggagcagatgccaaactggctccagtagaaagcttgaggatccctccgggcagggtagcaggctccgagagcaccctggagttcctgccggggtgtgggggtgcccaagcaccaccagcccctctcgccgtgtgcccgtgagtgcctgcttgaccatgtggctttctccatcgccggccccacagacaccagcggcgcctcccgtttctcagacgcatccaaggggtcccgctggagcttcctcgctaccacccccagcggggccccaaagtacttaccgagaaagacgagaaagacgcggcctcccatggttccagctgagctgccggcaggagcagcaggggaaagagtgagtgggacagggctgtcccgtctccgcaggctgggcagctgtgcgggctgtcccgaggccaggactttataaaggagggggggcggacagccgctggcccagggccctccccggaactggcggtgcagctggaagccagcaggaaagcacaataaaaacacagaaccaggggcgctgcacacacacacacacacacacacacacacacacacacacgtgtactcgctcagcaagaatgaagtgcaacctgctttaaaaatccctctgctggagtttccaccatgtggctctgaccaaccctctggcctctgtgtgttccaggctggctgctgtgcaggggaaggtgtggcagccgggcggggcggtctcgcctggggccacttggctcttccctgggcaggcacgcaggggccttgtcagaaatagctctgggctcccactttggtagggctcaccctgtgcccagagctttggcatgccagagttggcagagcctgcgtcccagctggcagtatcttcccctgctgttttccagatgaggaaactgaggccaggtacagaggctcacgcctgtgatcccagcactctgggagggcgaggcaggaggatcgcttgagctcaggagtttgagaccagcctgggcaacatggcgaagctcggtttctttctttctttttaaattaattaattaattaattaattaaattttttagactttaagttctagggtacatgtgcacaacgagcaggtttgatacataggcatacatgtgccatgttggcttgctgcacctatcaactcgtcatttacattaggtatttctcctaatgcaatccctcccccaggcccccaccccccgacaggccccagtgtgtgatgtttcccgccctgtgtccaggtgttctcattgctcagttcccacctatgagtgagaacatgtggtgtttggttttctgtttctgtgttagtttgctgagaatgatggttttcagcttcatctgtgtccctgcaaaggacatgaactcatccttttttatagctgcatagtattccctggtgtatatgtgccacactttcttaatccagtctatcattgatggacatttgggttgattccaggtctttgctattgtgaatagtaccgcaataaacatacatgtgcatatgtctttatagtagcatgatttataatcctttgggtatatacccagcaatgggatcgctgagtcaaatggtatttctagttctggatccttgagaaatcaccacactatcttccacaatggttgaactaatttacattcccaccaacagtgtaaaagcgttcctatttctccacacctgtgatcccagcactctgggaggccgaggcaggaggatcgcttgagctcaggagtttgagaccagcctgggcaacatggcaaagctctgtttcttcaaaaagaaaaaaaattacctgggcttggtggcagacgtctgtggtcccagctgctactactcaggaggctgaggcaggaagaatcacccgagctggggagtttgaggctgcggtgagctaagatggtgccactgcactccagcttgggtgatagagtgagaccctgtgtcaaaaacaaaaagaaagaaagaaaactgaggcattacagtgtccacataaaagcccagggagggagaaggggccctcttccgatgccaggcaggtgccaagaagagaagcttcaccgcacagagcagaccccccggatctttctggtctttctaagccagtttcctcctgtgggaaacttatatttcagaggcccctgggcacttcgttaatcaacagagaatcatgtgataggagggttctttcctttctggataaatcatatgattagcttgtctcttgaggtacgtaatcattttttaaaacgctatatatatttttaagagatcttactctgtcacccaggctggagtgcagggtcaccatcacagctcactgcagcctcaaacttcagggctcaagggatcctcctgcctcagcctcctgaggagctgggactacagctgtgcaccatcacgtctggctagttttctccttaagtgttttttttttttgtagagacgagatctcgctatcctgccaagaaaatgctattatttatggagcacttaatttgtaccaggtctggtcctaagtgctttttttttttaatctatattaactcatttactccttaaaacatctgcaatgatgttgtcattcccatttgacagaggaggaaactgaggcacaagtgactcacccagctgagactcagatccacaggccggcagcccagccctggagtccctgcgatgagcccaggggaaagtctccactgggcactaacatgtctttagcgcctccgtgaccctgaggcttagcaggtgtctgtatccagccagaattcaaggacttggttttgtgttcctcatatttatatttatttttaggtttccctactatctggggcaatgaggagggtttttcagtgaggatgccgaaatcaagtctccttgttacatgagtaaattcaagatgcagaagtgatgaatgctaaggaaaatatagttcagttgttcaaagggggagattgcagcgatggagaaaaaagtcactaatgactgaagtcagagaactattgtcctgggaataatcaaacatccacagtcctagaatttaccccttcctgtcccgggctcctgtgggggtggcctgggctgtgggggaggggagtgaacaccagcagaagctggaaggagagagggccagaccaggtctggagggattttgccttttttttctcagaaagccagaaactccagctagaaccccagggctcaacgtcccttctctgcagatcagacgggcaggtcagacagctggcgtctgcagaatctcagggaggtagtggcacttcctgatgccagggattgtccctacaccccttcatggtgatcatcgactcttcttaatttaattttattttactgtattttagagacagactctggtgttgcccaggttggagtacagtggcgccatctcgactcactgcaacctccgcctcccgggttcaagcgattctcctgcctcagcctccagagtagctcggactacaggtgcccaccaccacacctggctaatttttgtatttttattttattttatttatttgttcattcatttatttattttgagacagagtctcgctctgtcacccaggctggagtgtggtgatgtgatctcagctcacagcaacctctgcctcctgggttcaagagattctcctgcctcagcctcccaagtatctggaattacaggtgcaagccaccacgcctggctaatttttgtatttctagcagagatggagtttcgctatgttggtcaggctggtctcgaacttctggcctcaagtgatctgcctgccttggcatcccaaaagtgctgggattacaggcgtgaaccacaatgcccggcctgaaacattctttttaaatttttattttattattattattattatttattattacttttttctgagacgaagtcttgctctgtcacccaagccggagtgcagtggtgctatctcgtctcactgcaatctctgcctcccgggttcaagcaattctcctgcctcagcctcccgagtagctgggattataggcacctgccatcgcatctagataatttttgtatttttagtggagacagggtttcaccatgttggccaggctggtctcgaactcctgtcctcaaatgatccacgcgcctcagcctcccaaagcgttgggattacaggcgtgagtcaccattcctggcggctttcttgagtctctccaatacttctcaccatctcccttcttccctagcaaccatctgccctcgagccgcattaggctgtcagccccctgagtgacttttgtctttttctctgcagagcaccagcacagagcctgtgctgagtggggccctatatggtaaaccatgcaaattagtagtactcctgccactccactccgctgccgcccagctaaaggaagcctccttcagcctcgctgatctggtccctgccggggtgtctgcctatgtttctccgccttctctttgtccagaagtctcagtcctgctgacctattttgcagcttctggacaacctctgcaatgatggggggtgcgaacatggtcctcatttgtcaaaaggggaactggaacctgggggtttggggcccctggccccaggttgctcagctaagaagtaacccaagattacctgtaatcccagctgcttgggaggctgaagcaggagaattgcttgagcccaggagatgtaggttgcagtgagctgagatcgcgttattgcactccagcctgggcgatagagccagactccgtttcaaaaaaaaaaaaaaaaaaaaaagaagcaacccaagattatccaaccaacaataataatggtattattaattatattagtataatttattgttattattttagagacagggtctctgttgcccacgctggagcacagtggcggtggcacaattatggcttcaggcaacctgcacgtcctgggcttatgtgatcctcctgcctcagcctaccaagtagctgggactacaggcatatgttgccatgcctggctaacttttcactttttttgtgtgtgtgtgagggggacggaatcttgccctgttacccaggctagagtgcagtggcgagatctcggctcactgcaacctccgcctcccagcttcaagcaattctcctgcctcagcctccctagaagctgggattacaggcacacaccaccacgcccagctaattttttagtagagacggggtttcaccatgttggccaggctggtctcgatctcctgaccctcaagtgatccgcccacctcagcctcccaaaatgctggggttacaggtgcatgccaccatgcctagccacactccttttttaaatttaaaaactgagtgaagtcaggagaaaaaaatcttaaattgcagcatgacagattccatactagaatcttgaaaaagtctccaaagccccataggaaaaagccaccttgcaaaaaagctgagatacaaagataataaaagatttggtttcaggatacaaacatatgcaagaagactttaaaaaataatcaaggctgccgggcgcggtggctcatgcctgtaatcccagagaggccgaggtgggcagatcacctgaggtcaggagttcaagaccagcctggccaacatggtgaaaccccgtctgtactaaaagtacaaaaattagccgggtatggtggtgggtgcctgtaatcccagctacttgggaggctgaagcaagagaatcacttgaacccgggaggcagaggctgcagtgagctgagattgcgccactgcactccagcctgggagacaagagtgagactccgtctaaataaaataaaataaaataaaaatacataaatataaataaataaataaaaataaacaaggctgggccgggcgcagtggttcatgctcgtaatcccagctacttggggatgctgagacgggaggattgcttgagcccaggagttcgagaccatcctgggcaacataatgagacctccatctctacaataaaaataaaaaattcgccaggtgtggtgactcgcacctgtggtcccagctactcaggaggctgaagtgggaggatggcttgagcccaggaattcgaggtggcagtgagctgtgatcataccactgcactccagcctgggtgacagagcaagaccctgtctcaaaaataaataaaataaaaaaataagtaactgagcaaaggaataaggtgcaaagaatattcagagtggtggtaatcagcaagataaagatgggagcatgggaacaaggtcatgtctcagttcttggtgatgagggaggctcatgggtatgccttccttcccttttattttttaatttacatattttttgcaaagcaaagttctttattcccgcaaattgtgaacaatacacatagtagtttccacatatgaatgtttcctaaaatgatggctgttttgttttgttttcttgagacagagtctcttgctctgtcgcccaggcaggagtgcagtggcacaatctcggctcactgcaacctccgccccccgcgttcaagccattctcctgcctcagcctcccaagtggctgggattacaggtgcacaccaccacgccaggctaatttttttgtatttttagtagagacgggcatgagtcactgcgcccagccaaaatgatggttgtttaacgtaacgccatgtaatgcaggcatgtggtgttttgcggttatattcacatgtgattttatcagggaccaaagcaaaaacaaagagaattctgaaaagagtttgtatcaaggaagataaaatcggccaggcagagtggctcatgcctgtgatctcagcacttttggaggccgaggcgggaggatcccttgagcccaggggatcgagaccagcctgggcaacatggtaaaactccatctctaccaaaaaatgcaaaaattagccaggagtgatggcatgtgcctggaatcccagctactcacggggctgaggtgggaggatctcttgagcccaggagttcaaggttgcagtgagctctcgccactgtactccagcctgggccacagagtgagactctgtctcagaaaataagtaagtaaaataaagctgatcatggatagaccgatggtcccaagaattacattgtttcatgaattatataaacctgaggctctatacaaatatttaaaaaagaattttaaaatgtgtaaaggttttaaggagaagcgattagaggaagcaaaggagagagtagggtgggggaggggaacagctcaggggtggctgtgggggtggggaactggtggcagccaacaagaagccctgagctgggaacgctgtgtgacatttggtggcatttttatcaccttcttgcagctctcagtgtcttccccattttgcaaaatcttctgagcagggtggtgccgatgtcccgataaggatggggtcaggcttctggggggcactgtgaggatgggggtctcagaatccttcccttgactttcgatgggtggggaaggccaggggaggaagggggcttattcaggctgggtgcccacccgggtcaacccctccgcatgcctctgggcctcttctgttgtgggcttgtgggttcccgagaattagggccatggatggcactgacggtcccagccagtaccagaaagaaacgatgggaaagcattgatgagaatcaacccatccccagggctctgtccctcggatggaggtctccctttcacttctttccaggcatagaaaacagtttgcggctcctcaaaaagttacttgcagagtgaccctgtgatccagccattctgctcctgggtatacacctgagaaaactgaaggcagacactcaaacggatacttatgtttatttttaaatttaatttaatttaatttttttgagatggagtctctctctgtcacccaggctggagtgcagtggcgtgatcttggctcactgcaacctccacctcctgagttcaagctactctcctgcctcgcctcccgagtagccgagattacaggtgtgtgccaccacccctggctatttttgtgtgtgtgtgtgtgtgtatttttagtaaagacagggtttcaccatgttggtcaggctggtctcaaactcttaatctcaggtgattcccttgcctcggcatcccaaagtgctgggattacaggcgtgaagcaccgcacctggcctcatatagttactttttgtgtatggttatgacgtagggtctaagttctttcattattattattattttttgcatgtgtatatcctattcttgggaaaatttaaaggggattatttctgtttctggtaacgcgcgcgttcatcctgtgctcccctgcctgtaattctcccactagggtcagagtagggctggaaaagcgaaaaccataactagaagagacttccccaacaggatgttgcccaaccctggcagggctgacgtccagcctccagggtccttaccggcagtgcagtcacagctgtgactaaacccagccacccacagcctgacgcccccacacccttgaccttccctttagcttcgggcttgagcaggcctttgatactcaaatagagaaaggagacagcaagacccctgtgccttctcagagggggcacccccttccccgatgccttcacgggtcctgcctctccgggacccagcttccctcctggccaccccaccacctccccagccacacctcatttccacccatctagagagggtgaaacacaaacactcctggcagccctgcccgagtgtgtcctgggacatggtggggtgggggctccccgactcctgggaaggggaagtctggggtggcctgtcctcccagctcctcgccccactggttcctctccccatgagtcatgggaaaaagcaacaaaaccaaccgcagggagatataatatctcttcctgtatctgtgacagctgtcttgttggtctggccgtctgttcttcctgtgagcatctgaatccgttcagaccaagctcttcctctccttgagcaccctctatggctcccaccttacccagtaaaatccagtcttccccaaggcccacaaggcttggctgtgtgatttgccctgtcacctccagctctcttcccctcattcacttggctccagccacagcaccttcctcactattccccaaacaaatataccaggcccagtccagcctcagggcctttgcatgtgctgttttcgccacctggaatacctttccctcagaatttttttttatcttttaattattttgttttttgagacagagtcttgctctgtcacccaggctggagtgcagtgacacgatctcggttcaacctctgcccccgccccctgcctccccgttttcaagcaattctcctgcctcagccccctgagtagctgggattacaggcgcctgccaccacgcctggctaatttttgtatttttagtagagagggggtttcaccatgttggccaggctggtcccgaactgctgatctcaggtgatccacccgcctcggcctcccaaagtgctggaattacaggcgtgaccactgtgcctggccgagacactgcacctggcctcttcttacttttagagacagggtcttgctctgttgcccaggctggagtgtggtgttgccttcatggctcactgcagcctccacctcctgggctcaagtgatcctcctgcctcagcctcctgagtggctggggttacaggcccgagccaggcctgttctgtttcttctctgtactcgaaacctacagcaatgctctaggtttgctcaatacacacagtagctgctcaataaatgtgcataaataatacatgaacgatgagttctagctgggaaatgacaactgggaaaagtgggatgtggaggataatttaagagatgagagctgtttccgaaactcctggggggcctgaggcgcccggatcggggagaaacgggggcgaccatccacttccccggcagtcgcacgcacctccccttggcggcccacagatggcgctggctccacgcgctgcagcggcgggaagccggaggtgggaaaacccaagctttagccccctcccctgtctggctgctggggtcagttcctggcccggattaggatgccaagcccgggcaccctgcttggggtcccacctcctggtagacgggctttttggtcaaatgaggggaatctgagaagagtgggggtggtccactctgtggtcctccctctgtccacgcatgctctgatttccccattcctaaaactagttcagcagctccatgcctgggggaggggtgaacgcacttaaccatgttcgtgttctgccttaactttatataggttagagctgggcgcagcgcttggtgtcagtgggtcctgggtgcacatttgtggaacagtgaatgggtgaatccctgttttacagatggggaaactgaggctcaggaaggcgatgcggctcacccaggttcatagagccagaaaatggcaaggctgggatcggagacaccaggcctgcgtgagtccagagtcagctcgttttttttttttgattgtttgtttgcttggtttttttttttttttttttttttgagacagggtctctgtcacccaagctggagtgcagtggcaggatcttggctcactgcaacttccgcctcctgggttcaagcgatctcctgcctcagactcctgagtagcggggattgcaagcgcgtgccaccatgcccagctaattttttgcatttttggtagagacagggttttaccatgttggccaggctggtctcgaactcctgacctcaagtgatctgcctgcctcggcctctcatagtgctgttgcccaacctcaaaaaacgaaaacgggaagtttttgtcaacaggagcgtgggaaccggaaatccttgcttccgataccggaagtcagagaccacacatttgcagggagcgaaattgaggtcccagtgcgggggcctgcagaaatccaggaataggactcagggatctagggctgggatgttggtggttctgagcgcccaggaaataggagttctatgagagtaagtatgagaaattggaagaatgcagagcttggaaaggaattggagggagtcagagaatgagggagactactgtgagctgggagggaccagccagagtggcgccagtgtcccgtggttcaggagttttgataagagaatgcaataaactagaattgcactagagttaaaaaaaattaattatagtttatttttttgagacagagtctctctctgtcgccaggctgaagtgcagtggcaggatcttggctcactgcaacctcggcctcccaggttcaagcgactctcctgcctcagcctcctgagtagctgggcctacaggcgcgtgccaccatgcacagctaatttttgtatttttagtagagacggggtttcaccatgtttgccaggatggtctggatctcttgatctcgtgatccgcctgccttgacctcccaaagtgttgggattacaggtgtgagccactgcgcctggcccaattatagttattttaaattccctattagtttatttctaagtctggtttctgctgatttctctgtggtttgtgttttcttgcttttgcttgtgcttcataatgtttttcgagacggagtctcactctgtgcccaggctggagtgcagtggtgtgatcttggctcattgcaacctccacttcctgggttcaagcaattttcctgcctcagccttccaagtagctgcgactacaggtgcacatcatcacgccgtctaattttttggatttttagtagagacagggtttcgccatgttggccaggctggtcttgaactcctgacaggtgatctgcctgcctcggcctcccaaagtgctgggattacaggtgtaaaccaccgtggctggcccgtgtttcataatttttgattgaatgctggacaatttgtgtagggcagctgacaatgaggtattatttatgactggaaatgagcacatctttatattatttctcctaagctatttttgtgggaggttaagtctgtctggaatcaggttaagtctgtctgtaatcagtgaaccccaggcttcagtttatttgagtgttactttggtgtcttgtgttggggtgagggctctctttgcaagagggtttgtttgtctcatagttgttctaccttcagctgtggctcttccctatgtagctgcatttcagagagagtctctccacattctttgcactcctgcagagttctaatactttcatcagtgaccactcttggggctattaaattcattaaaaatttagatgaattcttcttagtcacttgtattgacacccagataacttccttttgtgctctgccttaggttcgccactactccttatggtctctctttagacactcctgtctttcctttggtttcaggctactttcttgtcccattacctctgttctctaatgggttcaagaaaattaatggttttgtagtttatttggattttcttattcttgggtttggagccatactcattttcattttctattttctaggcagaagtagagatcccctccattttttcctaacgttttaataattttatttttaatttttagattttaaatccatcaccttatagccatacatattcacagttttataaaacatctattgacaaaattaactttgtgcagagaaaaaagcatttgatctggatgtctaggaattcatgagagtatacccttaatgaattaagaactaattaatgcatttgctttcctgacacttttatttataattttaaaacatagaaaaaattcagaagattgatacaataaacactcatatatcatccatagagatggaacaatattattatagtggcaccctagaaaacatctctctctatatacacagatttacacatacaaaacattggtagtcagtggcagatatcatggcacttccatcttttttttttttttgcagcagagtttcgctcttgttgcccaggctggagtgcaatggcccgatctcagctcactgcaacctccgcctcccgggttcaagcgattctcctgcctcagcctcctgagtagctgggattacaggcgtgtgccaccacacctggctaattttgtatttttagtagagacagggtttctccatgttcgtcaggctggtgtcaaactcctgacctcaggtgatccacccacctcggcctccccaagtgctgggattacaggtgtgagccaccgtgcccggccagcacttctgtcttaaataattcttcaacaaattctaagaataagaatgttctttatataaccatgatactattattacacccaaaggaataaataatttcacaataacttttaatatgtaatgcatagtcaaattatcccgcttgactccaaaatatcttttatactatatatttgaactagagtttccaccaaaactgatattgaatttgattgtttttctggttttgtgtcttaatctagagtagctactggccacttttttcatgataatgactttagaagagtctaggtcaattttcttgttgaatgtctcatgttctggatttgccagtttgtttcctcatcatgtcacttaacttcttctgtccctcatatttcatgtagattgaaggttagatctagaagaacggggccaccaaactttttctataaagagtcagatagtaattttttttttttttttggttttgtggccttatagtctctgttacaacaactcaactctgacattgtaggttgaaagcagctgtcaataatacatcagtgaataagtgtagccatgttccaataaaaccatatttgtaaaaacaagcagcagggtgaatttggtctgcatgttgtagtttgccaaccttcagtctaaagactagattagattaagattaggctgatttgtcaataattctttatttgccacaaacatgattttgtaacttcatgtcttatcaggagatatataatgtcaggttgcccctgtattgataatgttaagcctgagactgagttcagatagtgactatcagatctccacattgtaaatgtacactttggcacttgtaattaatcagtaatttgtgagatgattctttggcactgtagggataccctgttctccaatatgcaacatttttagtggtcatttactggatattgaaaaatcatgattttctaattctatcatatcttctacatttattggctggtattttatgtatcactatgaactcatggatattttttatttaataggttataataatttaaagtcattttccttgatgttccaatcggtatgaatttggtcagtgggagcccagagggaatattattttaggtggaactgctctggatttaggtatcatgccgaggatgaaataacgttatctataaatacattttacaaaatgtgcagtagaaatatatgcctacttccatagctcagtttataaaatggaagagtgaagagattctatttacaaagttctgattttactctagccaggaaacattaaaaaattatctgtaagctctgtaaaggcaggaattgaatctttattgatctgtgtgctgcacttggtgagtaataaaaatatatttgttgaatgaattaaattagtgactctttagaaaaggagagtgaagaacatggggcatgcaggtagggagctcaggtgacctggttttcctgtaactgagatgtttttctgggattggggctttttgtactaaaccaggaaagtgctgggcaattgagatcagttgtttgctttacatgaaggtcctggactgaacaataatttcctctcttatgctattttaagaaagtctgttaaggctggttttcctggttatatattttcaacttgaggaagatctttttagaaaaggaggttgaagcagaggacttaatccaaagtatgtgtgaaattgggccatagcaccttacctgcaatgggagttagctgagcatgctctacggatcagaacacctaaattctacagcaaatgagtgtcaaacatttcctggaaattttcttttataatggtgccatgaaaagttatttgtaacaaacatgaaaaagcatttttaagatactcctggctcagtgaatgacagttcaatattgtcctcattttccaggagacaggatcatctggtttagctgctcattataattatcctgtgaaagaagatgtacaaatactactgtataaagaagtacaaggcttgtacattgaaaattatgaaacattgttggaagaagttaaagatctaaagaaatggaaagacatcccatgttcatgaattgggaggcttagtattcataagatagaagtactccccaacatgatgaatttaacatagtccctaccacaagcccagttaacttttttgcgtaaattgacaggatgaccctaaaatttatgtggaatggtagaggattcacaatagtcaaagaatcttggaaaagaagaaccaacttgaagactcacatttcctgattttaaaacttactacaaagctacagtaatcaagacagtgtggtatgggcataaggattagacatatagcccgatgaaatagaatcaagagtacagaaataaactcttacatttatggtctatagattttcaacaaggatgtgaagacaattcactggggagaaagaatggtctatttaagaaatgtttctgggacaactgtatttcagcatgcaaaagaatgaagttaagcttctgcttggggcctggaagggtgatgtggctgtggcatcgccggcctcgctatgtctgccattttcaatattcagagtctattgactgtaatcttgctgcttatatgtacctgtgcttatattcgatccttggcacccagcctcctggacagaaataaaactggattgttgggtatattttggaagtgtgccagaattggtgaacggaagagtccttatgttgaagtatgctgtatagtaatggccttcagcatcctcttcatacagtagctggggaaaatgccagaatttaattgccatcagatttcattgtgaacaaggacttactgcagaaaataatggaaaggatgtttaactcttttatctccgaacattgaatgagataaatttccagatgctgttctctattttaatgttattggaccaatattctgtataaataattaagatgtaaccatttaatagtctgtaacaatgaacctcagtactgtcactacaatattacattctgcaaatgttattctgttgtatcagatacgaaattttagtgaggtatctctaaggcatatagtagaaaacaaaattggttaattaagttcgtttcactgtgatttggaaatgatttaatctttatagaatgagacccttttttggactagctttttttattaaaatggctcaatatgtgtaaaaaaaaaaaaaaaagaatgaagttaagcccctacctcacactgcattaaataaccaactccacatggatcataggcctaaaagtaagagctaaaactgtaaaacttgtagaaaaaaaaccagaagtaaatctttttgaccttggtttaggcagtggatttttagatatggtatccaaagcacaaatgacaaaatacaaaattagataaataggactgcatcaaaattaaaaatgtttatgcatcaaaatcatctggcaagagacttatatccagaacatacatagaacttttacaacttaacaataaaattcaaataacccaattaaaaatgggcaaataatttgaatagatatttccccaaagaagatatgcaaatggtcaatatacatttgtaaagagtcttatcataagtcattagggaatgcaaattaaaaccacaccgagttaccactccacatctgttggaatggctaaaataaaacaaaagacaagcaattaacaagttttgatgagaatatggggaaattggaacactcctacattgttggtggagatgaaaatggtgcagtcactaagaaaaatattttggcagttcctcaatatgttaaacatagcattaccatacaacccagtaattctactccgaggcatatattcaagagaaatggaaacatatgtctacacaaaaatttgtacacaaggctgggcatggtggctcacgcctgtaatcccagcactttgggaggctgaggcgggcctaccacctgaggccaggagttcgagaccaacctggccaacatagtgaaacccgtcttactaaaaatacaaaaaaattagccaggtgtggtggtgggtgcctgtaatcccagctactagggaggctgagtcaggagaattgcttgaacctgagaggtggaggttgcagtgagccaagaaggcgccattgcactccagcctgggcaacgagtgaaactctgtctcaaaaaaaaaaaaaaattgtacacaagcgtttataagaatattcataatagtccaaaagtggaaaaactgaagtgtctctcatattgatgagtggatatcaaaatatagtctatctatacaatggagtactatttggcaaaatagataatgaaataccaatacatgctacaacatggatgaaccttgaaagcattaagctaagtgaaagaagccactcacaaagtcaaaatagtgtatgattccatttatatacaatcgagagagagagagagacagagagagagagaaagaagttaagtacaactcaagggattctgacttgagatgctggaataatggagttttgccatgtacatagatgggaagattgtgagtggagaaggctgggagtaattaggattaagattttgggcatgtcaggtttgaaatgtgtgttaagcttccaagtggagttgtctaagaggcagttgggtctatgaatctggagtcatcttgtctgaagatacgcattttggattctttagcctccatatatgatcttaagtctatgagacagcatgacattaactagagagacacatggtgagagacagatagggaaaagtgaggacaggtagggaaaagaagaggctagaagacgaaatcatggaatgttgcagcactgagaacttgagaagatgaggaggagccaatctgggtttcagctttaacaccaaccaactggtacctgtttatatccctggtgatctactagtagccacatctgatggtcactcatttaattatcctgacatttcacttcccaacatttcttccatgaaactcttctactcttttgacaattctcccactctctcagccccgcccaccccctaacgctgaccttttctatttatccaactttactaattaatgtttaatatgtgtcttgtggcttacaacacagacacatgcacattggcctggggctgcagattattcaaggaagcatgctcagtgctcatcagtaaatgcctggagtgttgggtgcattcttgtgtctcacaatttagaagcagcagtgatagaactgagtgaatatagaatgtcagtggaagaggagttgttgacaaaggaactcattccaccttctaaggagtatagaaaactcgtaagggtgaagacaggaataaaccttttgtctaagaaatgactagtggtttcatggaagagtgttgaaaattgatcgattccttcaaaataactaatcatagacgttatagggaaggcaattttgactcagatttttcaatctctaatgctgggagctgtccaacaatagagttgattgcaccattgtaactgcccaatgggttcaccttgcctgctgcctagacagagctgctttatcaagacaggagaattgcaatagagtttaaattcatgtagagccagctgtacaggagaccgcagttttattattactcaaattagtctccctgaaaatctggggattggggttttaaagaataatttggtgggtaggagttgggaagtggggagtgctgattgattgggttagagatgaaatcataggaagtcaaagctgtccttttgtgctgagtcagttcctgggaggggccacaagaccagatgagttaatcagtctgggtggtgccagctgagcaatggagtacagggtctgcaaagtagctcaagcaccaatcttaggttttacaatagtgatgttgtccccagaagcaatttggggaggttcagaatcttgcagtctccagctgcgtgactttcttttttcttttctttttttttttttttttttttgagacagagtctcgctctgtcgcccaggctggaatgtagtggcacaatctcggctcactgcaagctctgcctccctggttcacgccattctcctgcctcggcctccagagtagctgggacaacaggtgcccaccaccacgcccgtctaatttttttgtatttttagtagagacggggtttcaccatgtcagccaggatggtctcgatctcctcaccttgtgatccacccgcctcggcctcccaaagtgctcaggttacaggcgtgagccaccgcgcccggccaactgcgtgacttttaaaccatagtttctgatcttgtggctaatatgttagtcctacgaaggcagtctagtctcccagcaggaagggaattggttttgggaaagggctgttaccgtctttgtttcaaagttaaactataaactaagtttctcccaaagttagagcccaggaatgagcaaggacagcttggaggttagaggcaagatggagttagttaggtcagaccactttcaccgtcataatgttctcagcgatgattttttgcaaaggcagtttcagcatcactctcctcaattagaaatggaaggaccaggccggttgcagtggctcacgcctgtaatcctagcactttgggaggctgaggcaggcagatcacaaggtcaagtgatcaagaccatcctggccaacatggtgaaactctgtctctactaaaaatacaaaaatcagctgggcgtggtggcacgtgcgtatagtcccagctactcaggaggttgaggcaggagaatcacttgaatccgggaggtggaggttgcggtgagctgagatcgtgccactgcactccccactccagcttggcaacagagtgagactccatctcaaaaaaaaaaaaaaaaaaaaagacaaagaaatggaaggaccgtttccactaattgagtgagttacatgaaaagttgaccattcattcagtctttcctgttctacatcactcccctggaagacgacggcactgaattagctttaacatgtgcgtgatggtgaataatgacataatcttacaatggcgacttcacataagggtgttactcaaaatctctgtgagacttaactacagagtagctgaaagtttttctagcttcacagctttgttaattctacttattttttcaagatttgcatatactagtttaggtttacctattcaacaagaatttaccacactttccttctatgtcagagattttgctacacagagggggtatgaaggtcccacccatcatgagaattaatatttagattactaggaaaggatcacttattgtttgagttagcattctatgtatagaacaaaacccttctaattacacagtaataagaatgcagttttgcaaagaatttcatgtacattagaaaattttaatggtatgctgagatgcttaaaaaaaatctaacttaggctgggtgctgtggctcatgcttgtaatcccagaacttggggaggctgaagcaggcggatcacgaggtcaggagattgagaccatcatggctaacacagtgaaaccccgtctctactaaaaatacaaaaacaaaatcagctgggtgtggtggcatgtgcctgtggtcccagctattcgggaggttgaggtgggagaatggcatgaactcgggaggcggagcttgcagggagccgagattgcgccactgcactctagcctgggtgagaaagcaagactccatctcaaaaaaaaaaaaaaaaaaaaaaatctaacttagacgagatgaagtgagagcaatgttttaattcaggggtcagcaaaccttcacagtgaaaaaggccagagagtaaatattttaggtaggttttccaggtcagatgatttctgtggcagttactcatatctgctcttgtaacatgaaagcagccacagataatatgtacacaagtgggtgtggctatatgccaataaaattttatttgcaaaaaaacaaaaaaaaacagaaatgggcaatttgggatgctggtcattctttgcatttaaagctagtcttgatgaaactgtcttttatgggttgaattttcattctctacaaattcatatgttgaagtccttaccgccaaaacttcagaatgtggtctcagctattctgacctttgtgaagccaatgtttagttttttcattgcaaatatctgagatgttcacaatagtttgcattgcttatgtgatcatatgttacattaaagccctcagttagaaatagggctgcggtgaatgtaattagttaagctaagatgaggtccatagtggagtagagttggcctctaatctgaatgttgtccatataagaaggggaaatttggacacagacacacctagagggagaacatcacctgaagatgaaagcagagattggggtgatgcttctatattgtcaaggaaagccaaagactgccagcaaccggcagaagctaggggtaaggcatggaacagaatctttctcacagccttcaagtggaaccagccctgccaacaacttgatttcaggcgtcatagtctacagaaatgtgagacaatcaattgctattgtttaactcacccaatttgtggcacattgttacagatgccctagaaagttaatacaccgtcttcaaaaattgtcaaaatcaagatgaagcagcatagttgtctggggtaacacctgaggtttgttgtcccacagccatggaagaagactgggatgcggacacaccagagtgaggttaagagcagaagtttaataggtgagagaaagagaagagctctatgtgcagagaggggtcccagagaaaatgggttgccagttccatggtgaaatgcacagggttttataaactagcttgaggaggtgttgtctgatttacataggccataaaagattggttggatcaggtgtgccatttgcatagcatgtggagaagctggctgccccaccctaatcttttattatacagatgggttctttacctgggcagccccatgttgcctgttcctttgctgtacacatggttgacaaagaaaaggaagagggagcctccatgttgaacatgactggtccccagctagcccttttctattggcgcagcagccggcattcactcatgcaagcttccagcttgcttatctatgtctgcagctcgatttttcaggctgttctttgttagaaaagaaatgattttgagggctgctttttgttaacggggaaaccttgccaaggactctgtggccctccctatctacctaaataatttctttctagctcctgtatcaaagacacgataagatatggtaattccagaactaaaagagaatacattgatgtttggatacattcaagaaccaccaaaagtgcctcccaatggtccaagccttgctacttatgaaagtcctgcagtgatgtcaccattaaaaaatgttgccctactgaggagtctccccagggccctcttcatgtccgtgttcctcaggctgtagatgaaggggttcagcatgggggtgaccatggtgtacatcactgaggccaccagacttgtcctagaagatggtgtggctgcagaactgagatagaccccaaagcccgtgccatagaacaaggtgaccactgagaggtgggaaccacaggtggaaaacgctttgtgctttctcccagctgaggaaatcctcagtatagagaaaacaattttatagtaagagaaaaatattccagtgaaggaaatcacacccaggacgccagttgcaaagtatatcaccacgttattaatgaaggtgtcagaacaggcgagcttcaggacttcaagtagatcacaaaaaaagtgtggaatttccatttcggtgcagaaggacagcctcaaaacagtcaaggtctcgagcagggaacccatgacactgatgcaccaggaccccagaaccagcagtccacagagctgggggttcatgatgaccgtatagtgcagggggtgacagacggccacgaagcggtcataggccatcacggtcaagagtaaattgtccaggcatccaaatgaagtgaaaaaaaaaatctgactgagacagcctgcatatgttatgaatttgttctgtgtcagtatattcagtaacatctttgggacagtcgtggaggtaaaacagaggtcagcaaaagacaggttggagaggaagaagtacatgggggtgtggaggtgggagtctgagcatatggccaggatgatgagcaggttcccggtgaaagtgactaggtacatggagaggaacagcccaaagagaatgaactgaatctctgacgttgctgaaaatcccaggaggagaaattcttgggcatgtgtttgatttcctgtttccatggggataaaataactgccacaagagagaaaaaagcaacagtcaattatcaacacactggcaacatggaaatttggttacatttaattttaagtgaaggaatcaattaacaaaagattgcctttttcttgctgtctttttctggggcatctgaaattcttccatccttttctttgctaccatcgggatctggaaatgtagtgttagttccataatacttgtaccctctatagcctggcttctcaaagtgttgtccatgaaccaacaagatcaacaagagtttctttaaatgcagaatccctggtcagacctacggattcagaatctacattttaacaatatcaccaagggtttcacatgcatattagtgatataggagttaagaaaaaatcacttacgcagatagtaaggttatgggagtcctcagtgaggcttttctttttaatgaaaagcagccccaaatcattttctaacaaagagcatcctgtaaaggcgagctgcagacacaaacaagctgggagcttgcacgggtgaatgccggcaggaactaaggactagaagttttcaagatggtggctccatcttcccttctctttgtcagccacgagcagacaagatggcgcagatcaactggaaagtccaattgcaaagtaagattagggtggggccaccagccttccctgagcactatgaaaatgtcatacctgatggaaccaatctgtgagcctgatgtaaatcagacactgcctcctcaaaggggactattaaactctgcgcattcaccaccagcctgtcctttcctctcggagacccttttctctatggagagaggtgtttctctttttcttctcttctccctattaaacctccgcctctgaactcctcgtgtgtgtccgtgttctaaattttcctagtgcatgccaatgaaccccagggtatatactccagacaatgtagcagcttcattaatatttgagtagcaatggtcttggacacttacagcttctagttctcagctcttctcacctttgttctcctccatgtcttccctcattcctcattacctaatatgcatgcaaaacaggagctcaataactatgctttttccccctgctatctgcatggagttgatacttttcacacattgttctcagctattccaacctttgtttataaagccaatgtttcattttttcagtgcaaacatctgacatgtttacaataatttgcattgtttatgtgatcatatgttacattattttacatgttcgttttgtgagtttctgttctgtcactggaaagccagtcagacattatgctttaaaaaaatattttggtaaaatatggttaaaaaattttataggtactgcgtattaaattaatgcgattttaggatatattttgaattttaggtagagaactccaaagtaccaatacttcacagaaacatagataataccgtggcagctgtcataatcaacttgatcagtgtattagtccattctcacgctgctgtaaagaactacccgagactgggtaatttatgaagaaagtggtttagttgattcacagttctgtatgacttgggaggcctcaggaaacttacaattatggtggaaggggaagaggaagcaagcatcctttttcacatggcagcagagagagagagagcgcgcgctaaggcggtagcaccatacttttaaacaaccagatttcatgagaatcccatcacaagacagcactaggggaatggtgctaaaccattagaaactgcccctgtgatccaatcacctcccaccaggcccctccctcaaccttggggattataattcgagatgagatttgggtggggacacagagccaaaccatatcagtcaggaatctggaaaacagtcaaaggtttagagcaacaaagtgaatccttaattttttaaaaaaggtgactgaaaccaggttggacagctttgtggcaatttatcattttcccaccatctttcttggctcagtggcattgctgaatatgacaaccccacagtcccaccagttcctggtgctgaagatagcggaaatgtatggcaatgttctgttttaatatgtccaatgggccgggcgtggtggctcacgcctgtaatcccagcactttgggagactgaggcgggtggatcacctgaggtcaggagttcgagaccagcctgggcgacatggtgaaaccccgtctctactaataacacaaaaatgagctgggcgtggtggcacacgcctgtaatcccagctacttgggaggctgaggcaggagaatcgcttgaacctgggaggcggaggttgcagtgagccgagattgtaccactgcactccagcctgggtgacaagagtgaaactctgtctccaaataataattaaagaaagataataattccaatggactgctgaaggaataacacaaggagcttacctttacctaccttgaaacctctctcaaaggagattgttgaaaacatttaaagacaaatgaactatccacaagtgtctggggaaaagcatatgagtagtggtaaatgatggacacgctgacatgtcttggaagaaaggctgtggagtgagatatttgggacatatgactttgaaaatttctcacgtattcctgggaatgtagaggtgaagctctgtcgttgtctggggtaaatacccaaggttcctcatctcacgccaaggaaattgagtacgcagacacccaaaaagtgggtttagaagcagaggtttaataggcaaaagaaagagaaaggagaacgtgcctgagtgggacttcctgctggcagcaaagtacactggattttatagactggcttgaggaggcagtgtttgatttaaatagggcccaaagattggttggggccaggcgtcgtggctcacgcctgtaatctcagcactttgggaggctgaggcaggtggatcacctgaggtcaggagttcaagaccagcctggccaacatggtgaaaccccgtctctactaaaaatacaaaaattagctgggtgtggtggtgcgcatctgtaatcccagctacttgggagcctgaggcacaagagtcacttgaaactgggagatggaggttgcagtgagccgagatcacaccactgcactccagcctgggtgatagagggagactatgtctccaaaaaaaaaaaaaaaaaaagaaaagattggttggaccaggtgtgacgtttacatagtccggaggaagctggctgctccatcctaatcttctattatgcagatggggtctttgcgggtcgctgccatgttgtcttctccttactgtacacgtggtttgcaaggaaaagggaagatggagtcaccatgttgaacatgcctggctcccagacagccttttcctatttgtcacagctgccagcattcacccgtgcagggttccagcttgattatctatatctgcagcttgattttacaggctgctttttgttagaaaagaaattatttgggggctgctttttattaaaagggaaaccttaccaaggacttccttaccctccctatctacctaaataataataataataataattttttttttttgagacggagtgtcgctgtgtcgcccaggctggagtgcagtggcgcgatctcggctcacttcaacctctgcctcctgggttcaagtgattctcctgcctcagcctcctgagtagctgggactacaggcgcgtgccacaaagcccagctaattttttgtatttttagtagagacggggtttcaccgtgttagccatgatggtcttgatctcctgatctcgtgatccacctgcctcggcctccgaaagtgctgggattacaggcgtgaaccaccgtgcctggcctaaatatttctttttaactcctatatcagaaagattcctgggaatgtaggatacataggtgtcctacccaggattgcatgctaagtaaacatctagaaggccctgacctctcacctgtagctgatattcaagctctgtgcaagtaggaagttaaggcaaaggctggagttgaaaaatgctcagctgagtggtaaaggcctgtctgaaagcacatacagagccaaactgcaaaggttgggagattttggttttgggctccactgtttaaggaaatctcttatcaaatcactctctggccattaagctaacagcctagagacttcagcaaccacacactggacaaatatgcaatctttataaaattagaagactcattaggcaagtaaacaactgcaaattacaaaaagcagcaaccataaaccccaaggaggagagaaaatttgatttccagagtcgccacactataatattcaaaatatttagttgtaatgaaatattatgagacatgcaatgaaacaagaaagtatagcaaaggaaagaataattaattagtagaacctgaccccaaggaagcctttactgaggctcaatgcctgggcttcttcgtttacatgcaatctcatttacatgaaatagccacaatacataaacgagtcgcaggataacgagtcgcagggactggggagcgggggtaggggatgaggataaagtgctactgtaatgtgtaagtggttttatttaggagtaatggaaatgttttgaaactagatagagatggtggttgcgcaaaacacagaatgtagtgaatggcactcaattgcttgctttcaagtaactggttaatttatgttatattaatttcatctcaataatttttttttgagacaaggtcttgttttgttgcccaggctggagtgcagtggtgcaatcatgactcactgtagccttgacctcctgggctcaagcaatcctcacatgtcagcctccaaagtagctgagactacaagaatgcaccgtcacacccagaagctagtggatctagatagataggaagtttgattgcctattgaattcctattaaattcctctgctatgtatatggcctcaatgtttgaattcacaagcacgggggttagaaggaacatttcttgttcagctttgatcactacgctgcagaatgcccaaagaaggtccccagtctgtactcctcctgcctgcaaaaaaaaatctgagagttcttggggctagagcttcctcacactcaaggggaatgagatgcacattgattcaaggctcattgagaccctggtgccttctgtaatctaggaccatccctggagcatcttcatgtctcccatgatggtccactgaggcaggacccaagaaacaggaaaataattttttttttttttttttttttttttttagacagaatctcactctgtcacccaggctggagtgcagtggtatgatcacagctcactgcaacctccgcctactgggttcaagtgattctcctgcctcagcctcctgagtagctgggataaaaggcatgtgccaccacagccggccttgttttgtatttttagtagagacagagttttgccatgtgcccaggctggtctcgaactcctgacctcaagcgatccacttttctcggcctcccaaagtgctgggattataggcgtgagccaccatgcccggcctgggaaattatttctgtgtgacaaaaaataatctgaatgaccagcttcattgggttttctttttctaccttccacatgtgaccatccattagggatctagtaataacatttttaagtcacaaactttgagagggaccagctatttttattatcccatttatataagactgctatctaaaaattacaacagttctgggacatatactgatatgagtcaatccaaaaatgtaatttggacatcaaagtaagaccagatggtgacttgttaattggagacaccaaattaatgttaataatacagaaaattgtcctctaactatgatggtattatacaataagtctgtactatttagagtctaaatgttcttgtcactcaatgagatgtgctttaactcaagacaaggtttactgctatttttttcagggctcctgaatacctgggcaatacctagtgtccttggctcccctctactgctgtgtggctgttactgtgtgtgaggtctttagcctacattaaggaacatttcaagaatctaaaaatgtgtttttggattccttcaagggaattggctggaaacattgctccttccatcacacaatgtgactgctttaagagaaacagtcattaatgtattttatgccttcatgtcaggaatggccatgttgctaagttttattttaagttccaggatacatgtacaggacatgcagatttgttacacaggtaaatgtgtgccatggtggtttgctgcacctgtcaacccatcacctaggtattcagccctgcatgcattagctatttatcctgatgcgctccctctgccaactcccactgacaggcgtcagtatgtgttgttcccctccctgtgtccatgcattctcattgttcagatcccacttatgagtgagaacatgaggtgtttggttttccattcctgtgttagtttgctgaggatgatggcttccagcttcatccatgtccctgcaaaggacatggtcttgtccctttttatggctgcgtagtattctgtggtgtatatgcacaaaattttgtttatccagtctatcatcgatgggcatttgggttgattccatgtctttgatattgtgaatagtgctgcaataaacatatgtgtggatgtatatttataataggatgaattatattcctttaggtatatacccagtaatgggattgctgggccaaatggtatttctggttctagatccttgaggaattgccacattgtcttccacaatggttgaactaatataggttaccaccaacagtgtaaaaacattcctatttctccacagtcttgccagcatctgttatttcttaactttttaataattgccattctgactggcatgagatggtatctcattgtggttttgatttgcatttctctaatgatcagtgatgttgagctttttttcatgtttgttggccgcataaatgtctccttttgagaagtgtctgttcatgtagggatggccatgcttctattaagcacttttttgttttaatgttatggatcctgctaatcttgtaattgatcattgtgccagagattgcctacccaatatatccattctttttttgttattaatagaactcaattatatttggaagtggtcatgtgtccagctaagatactatattttccactctctattgcaaaatcatggagagttgaagcataggaatttatttgatgggaatcctggaatcctctttagaatccttcccctctgttcatctctttcttgcctgggatttgcacatgacactggaattcccttagctgatatatcttggaaaacaacacattaaagatggggcagcagagagatagagtaaacccttgtgcctcaggttagcacagagtgatcatggtgacccattcttttagggaggagacacattaactcctgattgaattaaaacagtggtggatcacgaggtcaggagactgagaccatcctggctaacacggtgaaaccctgtctctactaaaaatacaaaaattcagctgggcatagtggtgggtgcctgtagtcccagctactcaggaggctgaggaaggagaatggcgtgaacccaggaggcggagcttgcagtgagccgagattgtgccactgcactccagcctgggtgatagagcgagactcagtctcaaaaaaaaaaacaaacaaacagtctttagaagcagtcaacaaacatgaaaaattgctcaaaaatttctctacatcctcaccaacatatttttttatttctttaataataaaccattctgactggtgtaatcatcagataaatgcaaattaaaaccacgatgagataccatcttacaccagtcagaatggttattttaaagaaataaaaaaaaaaaaaacaacaacagatgttggtgaggatgcagagaaaagggactgcttatgtgctgttggtgggaacgcaaattaattcagtctctatggaaaacagtatggagatttcccaaagaactaaaagtaggactaccattcaatccagcaatcccactagtgggtatataccccaaagaaaagaaatcattacacaaaagacacctgaactaatacgtttatcacagcactattcacaatagccaagtcatagaatcaacttaagtgtccaccaatgtatgattggataaataaaatgtggtatatatacagccaacggaatactactcagccataaaaagaatgaattcatgtcttgtgcagcaacatggatggaactggaggccattatcctaagtaaaataacttggaaacagaaaatcaaataccatatgttttcacttataagcagaagccaaacaatgtataccatgggcatagataatggaataatagtaggcattggagactccaaaaagtgggagggtgggagggatgaggtttgagaaattacctattgggtacaatgtacactatttgagtgatggttacactaatagtccagacttcaccactatgcaatgtatctatgtaacacaaacgtacttgcattcattacatctgtaaaataaaagtttttccatttatgtagacacatttcaacctaacagcacagaatgctttgtcctcgttagaactcatagagtcatatcggggcccaatttgggctactatgtaacatttggtgaaatatattttgattacttctgtaattatgcacctcgttgtatgcccccctttttttacttctgttacaatatttcctttgtcatatacatttaagatatttttctttgttttgcatattgagtaggtttcttgaaattcttttggaacatgttatgtaaatgaacaaataaatcaatggtgtgtttcgagtgacactcagccctgaatttgacccattgtatctctactttcaaaagcattctctgagatctccttaaactcactgttgtgctgatgagggattgatccacagaatgtaagaaacatctctggggtcaggttctagagggaaaacgctgaagtaaaactcacacctgcccaactccaagtcagggcctttctcactcacaatgcttcataaatacgaggagatggtaaagttgaaatagagccgaatcctgaggcttgcacatacgtaaaggaaggtcagatccggctgcaggaagagagtggccctggaattgtgccagattgaaagcaagaaacagagattgaaagcaagaagaaacagtaatggagagcaagaaacagattgaaagcaagaagaaacagagattgaaagcaagaagaaacatagattgaaagcaagaagaaacagagattggaagcaagaagaaacagagattgaaagcaagaagaaacagagattgaaagcaagaagaaacagagattggaagcaagaagaaacagagattggaagcaagaacagagagaggaccggctgcaagaatccccttcagagcgagggacacaaactgctcaggactttgaatcaatcctctttcaccatctcatcatttctggctgtttcccagaagacttggttaataaaagcttttcttccctccacaaaactttcccacagtacttacgggtttactctggcttctcttgatatccctcaatggacttggctctgttgaccttccctccttgcacaatcggtgcaggcagggcaagggggtgggtgtcaggggctggttctctggagtggatggacatttcagagaggcatagagaaggtgctcttggtctggggctggtgaactgcaggtgggttctgcaaagggagaatttacagtttatggagaaccggaggctgaattctcagggctcctcattaaataagttgttttattgttgctcaattctccaagcagttcagctccttggaggccaagcaatataaataaaaagtgtttctgccagttcattccccgtgggctcacctttgggactagacacatattcctttctattcgatggttttcatctcccttagaatgaacatccttcccccaacactggaaatgacccctcttccagggcacatctcaggaaccacctcatgaatctccaagtttctgagggacactcggtttccagtgttagacttagacatatggttttgtcccctaaccacattcaaccaaaatgagttttttttttttgttttttgtttttgagatggagtcttgctctgtcgcccaggctggagtgcagtggcgcaatcttggctcactgcaagctccacctcccgggttcacaccattctcctgcctcagcctcccgagtagctgggactacaggcgcccgccaccatgcccggctaattttttttttttttttttatagtggagatagcgtttcaccatgttagtcaggatggtctcaatctcctgacctcatgatccgcccgcctcagcctcccaaagtgctgggattacaggcgtgagccatggcgccaggcccgaaatgagctcttaactgcagctttgtcctggcttctattctggacactggagacagattctggagaaaaattaatgggccatttcccttggtagagagtaaaaaaggctcattttggctgcagagttagcgttttcttgtctcagtttctctgagttcagttattcggtttcttcatctgggctaaacacattcatatttttaatccacatgatctaattttttgggctatatttctatgtatgttatttggagcatttcttcccaatgggaaggaatttggataaaaaataatcagcacctgacagtgactaagagcatgcactggcaaacatttttgtaaagggctcagtggtacatattttaggctttttgggtcctatgttctctgtcacaatacttaactctgccattgctgtgaatgcaggtgtatgcaatactgacactaatgggcatggctgtttgtattagcctcctgtggctgctgtcacatgtaaccacaaactgggtggctgaaaacaacaggaatgtattctcttatagttctggagtccagaagtccaaaatcaaggtgcaagaagggccaggcttcctccagagtctctaacggtgattctgttcctcggcttttccatgctctatggctccaggtgttcctgaccttgcagctgcgtcatttcaatctcctctgtctgtgtcatttggtttcctctgcacctgtgtgtgttttctcctgtgcatgtcgcttataaagacactgtgtcattgaatttaaggtccacctggataatccaggatgatctcatctcaggatgcctaattgtatctgtaaagactcttcatccaaataaggctacattcactggcactaggggtgaggatgtgagcttatcctttaggggggccaacattcaactcaccaaacttactgtgctcaaataaagcctttttacaaagaggctgtgggtaggatttggcctgtgggcagtagtttgctgacccccagcttagagggtagattcagatacagggagctgataatcacagaggacactaaaatttaaagaaaagttaaatatggcttcatttctgctactgtaattcacctattaaaaggactgtcagactatccaccatactctaatcttttattatgcaagctgtaaatacagatgaagcttcacttgctcacctgctgctcacctcctcccgtgcggcctagctcctaacaggctgtggaccagtactggtctgtggcccaggggttggggacccctgcactaagttatttactactgtggacctatggggtgtaggtgctttttattgagcttcctggtgtgtgttgttcagtctttgctgcagtgactggggcagctctgcttcatgctgtggacaggctgggatggttctactccatatgtcttgtcagtggattagcaagggcatgctcttattgaaatagcagagactttactgctcagcagaaatatgcaaggtctcttaggggctacacttagagctggcatgctttctataatctcttccattgagggaagagagagaccctctcatattgttttatattgttttatactcagtacctgttttaagaaaaaacaaagaagtgaaatcaaagacaggcagcccggtgccaggcccaaaaccaggcctgggcctgcctggcctaaacatagtagttaaaaatcaactcatgacttagaaaccgatgttatccatagattccagacattgtataaaagaacattttgaaactccctgctctgttctgttccactctggccaccagtgcatgcatcccctgtcacgtaccccctgcttgctcaaatcaatcatgaccctttcatgtgaaatccttagagttgtgagcccttaaaagggacaggaatttctcactcggggagcatggattttaagacgctagcctgccgatgctcccagctgattaaagccactcccttcactatctcggtgtctgaggggttttgtttgcggctcgtcctgctacaccataatatagaattagagggaacacttcctaactcattttatgaggcaaaagttatcctggtgatggctgggcatggtggctcatacctgtaatcccagcactttgggaggccgaggcgggtggatcacttgaggtcaggagttcaagaccggccttgccagcatggtgaaaccccatctctactaaatatacaaaaaattagccaggcaaagtggtgcacgcctgtagtcccagctacttgggaggctgaggcaggagaatcacttaaacctgggaggcggaggttgcagtgagccaaggttgcaccactgcactccagcactccagcttgggcgacacagcaagattccatctcaaaaaaaaaaaaaaaaattatccgagtgtccaaaccagaaaacatttacaagaaaggaaatcttcaaaccaatataccatatgaacacagatgcagaaattctcaacaaaattacaaaattaacaaattaaatccaaaatatacaaaaataattatacactgtattagtccattttcatactgctataaagataccaccctgccaggcgcagtggctcacacctgtaatcccagcactttgggaggctgaggtgggcggatcacaaggtcaggagattgagaccatcctgatctaactcggtgaaaccctgtctctactaaaaatacaaaaaattagccaggcatggtggcgggcgcctgtagtcccagctactcgggaggctgaggcaggagaatggcatgaacccaggaggtggagcttgcagtgagccaagattgtgccactgcactccagccccagcgacagagtgagactccgtatcaaaaaaaagatactacccgatactgggtaatttataaacaaaaaaggtttaattgcctcacaggtccttatgactggggaggcctcaggaaacttacagtaatggaggggaagcaagacacgtcttcacaaggcagcaggaaagagaggcagagagagagaaggggggcgtgccagacacttatcaaacagccagatcttgtgaaaactcactcactatcacaagcacagcaagggggaaatctgcccccatgacccaatcacctcccaccaggccccttccttgacacatggggattacaatttgagatgagatttgggtagggacactgagccataccatattgtacaccatgaccaacaggacttaggttaggtcagtctctttaataaatgccattgggaaaacttgatatccacatgtgtaagaatgaaattggatcctatttcacaccatatacaaaattcactcaaaatggattaaagacttaaacattagacctgaaactatagagctactagatgaaaacatagtggaaagactgcatgacattggtctgggcaataatttttgggaaatgaccccagaagcacaggcgacaaaaggagacaaaatgtaaaatgagattacatcaaactaaaaacttctgaatggcaaagaaaagcaatgagcagagtgaaaagacaacctatgggttggcaggaaacattcacaaaccatccatctgataagggattcatatccaaaatatataaggaacccaaacagctcaatagcaataaaacatatatcctgatattaaaaaatggacaaagaacctggatagatatacaaaatggccaacaggaatatggaaaatgctcctttatttatgtattttttttttgagacagagtttcattcttgttgcccaggctggagtgcaatggtgcgatctcggctcactgcaacctccacctcccgggttcaagagattctcctgcctcagtctcctgagtagctgggattaaaggcacccaccaccatgcccagctaatttttgtatttttagtagagacgggggtttcaccatgctggccaggctggtctcgaactcctgacctcaggtgatccacctgcctcggcctcccaaagtgctgggattacaggcgtaagccaccatgcctggccgggaaaatgctccttaactgaacggacctcctcttggccaaaggaatcccagaaaaacttttaaaacttcacttccagccatgacgggacgagaggtcaaacacacctcgttataccccttccttttcatggttcactacacaacaaccaaccagcattaataaaatagagaccatgagactggcagaacagacttcttgcggcaataagatacccaattataagcagggcctaacgccatgcccggcaagcattaagtcacacaccctacccttaaagaataatttatgttctacctgccaaatggtttttatttttctctagcagctaaacaagctctggactcagggtaagcaatattaaaacaatttgcagctccaccagatactaactgacccccagcccctattccagcagccataactacagctttgattgggcaagagactgattgggcaactttctcctgataagaccactgactgtggactggctctggctcgtctacagaggctgctcacttgcgtgcttttctgttctgaaaagaacttttgagggatagggtctacttgtaatacatttaaatgttaaagtctccactccaaagtgggcatgggttgtatgttgcatgagtgtttgtttcatacacatgcaccagggccagcttcatgaatattcatatctcctcctataacctgttgaatatgtatgtctagccaacccattgagcataaagctcttagctcttaccccaacccctcctccttagaaatgcctgtctctctggtattggctagaggctatgcttcccactctgtgggattgccatcttgcaggctgtaaccctttacaagaaataaagtctcctttccttttctaaatttataaattgtggggggtttaaaagttaacatagccacataaacatgtttcccttagtttagaagggaaaaacaattttctggagatatcaagggctgtgtccccaccgcaagtcaatgctttttgatgatcctaaggacctaatcaagagagtttccttgagtctctgagtttgtgcgtgtgtgtgtgtgtgtgtgtgtgtgtgtgtgtctgtgtctgggtgtgtgtgtgttgagacaaggtcttgctctgttgcccaggcaggcgtacagtggtgcaatcatggctcactgcagcctctacctccccagctcaaacgatcctcccacctcaacctcccaggtagctgggactacaggaacatgccaccatgcccagttaattttgaaaaaatgttttgtagagatggggtcttgctatgttgcccaggctggtcttgaactcctgggcttaagtaatccaccccacttggcctcccaaaatgttgggattacagacatgagccgccatgttctgctgagtctctgactttagaggaaactttcagtgaaaggagcgtaccccataagtgtatatatctactatatacccacaaaaattcttttaaaaagttaaagaaaggagtgataaggtgtgtgatggttaatactgagtgtcaacttgattaaactgaaggatgcaaagtattgatcctgggtgtgtctgtgagggtgttgccaaaaaagattaacatttgagtcagtgaactgaaggaggcagacccaccctcaatccgtgtgggcaccatctaatcagctgccagtgtggctagaatagagcaggcagaagaaattggaaggagccgacttgctgagtcttccagctttcgtctttctcccatggtgaatgcttcctgccctcgaacatcagacctcaagttcttcagcttttggactcttggacttacagcagtggtttaccagaggttcttgggccttcagccgcagactgaaggctgcactattggcttccctaattttgaggttgtgggactcagattgtcttcctttctgctcagcttgaagacgatctattgtgggacttcaccttgcgataatgtgagtcaatactccttaataaactccacttcatatatatatctatcctattagttctgtccctctagagaagcctgactaatagaaggtgctaggaggttagatatctggaaggcaggtgagttattggagaaggagtaaaaattaatcaaataaataaataattgggttcacctaatgtctaacatggtctcttgggaacagagaatgagcaggaaaaatttccttactgtccagacaggagtccacagagaaatcagacacttacgggttagtaagttccagcagtaagaggggaggtgcctaatgagcagatacagggagctgtggccctcagagaatacaatagagaaaaaaaatgtctaacaaacccactaatagattaaccctcacaaggaaataattgcaaagtaaagcttgctatcataccccaaaagtaggctagctaatctgagtcccagactggggactgggctgaatgggacccttcagcccattccaggtgggaatggaagttcaattgttaagactctgcacaggacatgatctcattcctttttatggctgcatagtattccatggtgtatatgtaccacgttttcttcaaccagtctgttgttgatgggcatttaggtcgagtccatgttttcactccaattaatggatctactttaaaaaatagtggtcatcttttgccgctatgtagaacataaatctggctagaggacctatgcctcactctttcctgctgtctcgtctggggacagagcttcatcctctatcatcaaccattcagggtaaaattcagacttccatctggagatcctcttctctgagaccccatccaggtgagcccaggagccctcagcaggtttcatgggaaaggttcagagagaacggaagctgggaatgtttacctgaagtcacctgagagccaatccaacttaggccagcgccaagaggttgctatgtttgtttgcttagttgactgattatttcataatcaatctatttagtatgctaaaaagagcagtgtctgttagactcagcaatgcagagaccactgctgacaattaagtggtgggaatggaattccaattggtaagactgaagaaggaatgggagctaaaaagtggtgctggtaacatcagttcatagtcaaggagttttgcaggtaagagagaaaaaaaactgagtattaagtgtaaaggatatgcagcaaagtgagggcttttaaaatatttttaatattgggtgtattttgagtatgttcctgtatccattaaaaagatcacaccaatgtattatttgcaaatgctaccttgccacagcagttaataagtcatacattttatttattttatttatttatttatttatttatttatttatttatttatttttgagacggagtctcgctctgtcccctagactggagcgcagtagtggcacgatctcggctcactgcaagctccgcctcccaggttcacggcgttctcttgcctcagcctcccgagtagctgcgactacagttgcccgccactacgcccggctaatttttttgaattttttagtagagatggggtttcaccgtgtaacccaggatggtctcgatctcctgacctcgtgatccgcccgtctctgcctcccaaagtgctgggattacaggcgtgagccaccgcgcccggctgataagtcatacattttaaagtatcttttctcatgcgggttatccagatgaaaaaaatatgtttatttaataagtgaaaaggggtatgatagcaagctttactttgcaattacttccttacttgtgaggcttaatcgattagtgggtttgttagatagttcctgtttctattgcaaacagtctttgcgagatctttgcttttgtatagcgagtttgcagtgttttcattcctgtatttgattgcatttttttcaaacataagaatgggagttggtgaacgttttttcaccaacgttgttgtttgccatttagttctttttgtatttatagatgcgcttggggtgaatgcgttaaagtttatcagttttgtgcggtcaggtctatcagtgggtcacactgtgtatctcccttctgttgcattttagatagtttagagagtttaaaaagctttctacatatttcatcgcaataaatcaccttttatatgtatttccaccttatttcacacatttttttctttcttttttattatactttaagttttagggtacatgtgcacaacacgcaggttggttacatatgtacacatgtgccatgttggcgtgctgcacctattaactcgtcatttagcattaggtatatctcccccctccccctgccccataacagtccccggtgtgtgatattccccttcctgtgtccacatcttttttctttattgccacctttcttttttcttttttgcaatcagatctattttttttaaatttaaaattttattttaatttcgggggtacatgtgcaggatatgcaggtttgttacataggtaaacatgtgccatggtggtttgctgcacccatcaacccatcacctaggtattaagcccagcatgcattagctattttttttaatgctctccttcccctcacccccaccccctgacaggctccagtgtgtgtcgttcccctccctgtgtccccgtgttctcactcttcagctcccagttataagtgggaacatgtggtatttggttttctgttcctgggtcagtttgctgaggataatggctttcagctccagccacatccctgcaaaggacatgatcttattcctttatatggctgcatagtattccagggtgtatatgtactacattttctttaaccagtctattgttgatgggcatttaggttgattccacgtttccaattaatcagaactacttttaaaaatagtggttatcttttgccactatgtggaacatattcttatacccacgttgagatttcctgtgtattcttcatgtaagcatattttaatccatttcagtttgtataagatgaaatcataactttacatactgttgttttcttccactgctttaagaaagtatatttttatattctttcatttccaagtttttgtcaacttaatctcaaattcgaaacccatgttgatgtgattaatggttattttctatctttttctttgatcatttattttatttttatgcgtttatttatttatttagagatacagtctcgctctgtcacccagcctggagtgcagtggcacaatttcagctcactgcagcctcaacctcttgggttcaagtgattcttgtgcctcagcctcccgagtagctgggattacaggcatgcgccgccactctgcccagctaattttttgtatttgtagtagagacagggttttaccatggcagtcaggctggtctcaaactcctggcctcaggttgatctgcccaccttggcctcccaaagtgctgggattacaggcatgagccactgcgccgggatagatcatttattttagaattttattcagttttgttcaatgtggttgttttgaatccaccttatttaaccaagctttattttcccagccattccttttgtttaataagttcttaatttaaaaaaatgtgtttctcaatgaaaatacatggacatggggaggggaacatcacacatgggggcctgttggggggtcgggggcaaggggagggagatcattaggacaaatacctaatgcatgaggggcttaaaacctagatgacgggttgacaggtgcagcaaaccaccatggcacatgtatagctatgtaacaaacctgcacgttctgcacatgtatcccagaccttaaagaaaaaaaatcacacaggaaaaaaaaaagtgttcctatgtagacgtacaactttttgtgaaaccacaacagtgaagaaagcaggtgaaatccctgctaatttagatcttaccttgtaatggaaagggcagaaaacaatggaataaatgtgtgtctgacataaagtccccagaggtaagtcatatgaagaaaaatgatagattgtcgtggcaggggcaggattttctaaagtatggtctggggaggtctttgcatcttgcacgaggaacggaattggactagagagtgcccactggatttgtcagaaaagagggaaaaactcaatacctgggaattacaaagaacagatcccacaaggaaaagtgagagaaaggcctgcctcatctactactggaccatataaaaacatgtgtgggccgggcatggtggctcacacctgtaatcccagcactttgggaggctgaggtgggtggatcacgagacctgcctggccaacatggtgaaaccctgtctctactaaaaatacaaaaattagctgggtgtagtggcaggtgcctgtaatcccagctacttgggaggctgaggcaggagaatcgtttgaacctgggaggtggaggttgctgtgagctgagatcgcgccattgcactccagcctgggtgacaagagtgaaactctgtctcaaagcaaaaataaaaacaaaaacaaaacatgtgtggtccataaatatggaatagatacaggaataacaattagatcaggggtctgatgtgaattctgtaatgaggcaagtggatcaatgaaattctgctcagggtatgggccctggagtccggagataatgtcagttctacgctggctacctgttctcccaacagtgtggctcttctcttgagctcttcattcaggctgcatttcccaggaacttgccttaaaaacaaaaaacaaaaaacaaaacaaaactattccgcctttactgcagtggattccacactctttgtgtctgaaagtaagaaataccttttacatcatgagccagcatgcctgcacatgcaaatatacacacacaggtggctgaagaaagagtatcatgaaactagtttgtaggtacccttatcatatatgatgtgcttgaatattttcttctgcattttattcattctatgctatttaaatcttacgtaccatagcacaacccctcaatcagtcccaatctcagaatatggacaacattctcctagtgtgtcctccacacctgtgttagcatctccctgtatcttttatttcctcatcagcaattgctgggacaacacaaaatgtccctcaccattgtcaccattcttctttctacttctatgagttcattatcattttaagattccccatgtacgagtgtgcagaatttgtttcactgtgcctggcttatcatttaatgtaatgtcctccaggttcatccgtgtggtcacaaatgacaggatttccttctttttaaaggctgagtggtgttctattgtggatatgcaccacgtattcttgatctattcattctttggcggacactgaggttgactccatatgttggcttttgtaaatagtgttgcaacgaatgcggaagtgcagatatctcttcaacatactgatttcatttcctttggctatatatgcagtcatgggattatacacatatggtagttctatttttagttttttggagaacccccaactattttctataatgcttgtactaccttaagtttccaccaaaaaggtacatgggctcccttttctccagatcctcatcagcacttatctcctgtctttttttttttttttttttttttttttttgagatggagtctcgctctgtcgcccaggctagagtgcagtggtgcgatctcagctcactgcaacctccaccacccaagttcaagcaattctcctgcctcagcctcctgagtagctggcattacaggtgcccgccactgcgccggctaatttttgtatttttagtagagatggggtttcaccgtcttggccaggctggtcttcaactcttgacctcgtgatccacccgcctcagcctcccaaagtgctgggattacaggcatgagccaccgcacccagccacctgccttttttataatagccgtcctaacaggtttgaggtgacatctcattgtggttataatgtacatttctctgataatcagtgatgttgagcattttttcatgtacctgttggccagctgtatgtcttctattgagacatgtctcttcatgtcctctgcctatttttttttttttaaactgggttacttgtttccttgatgttgagtttcttctatattgggatattaaccccttatcatatgtgtggtttgcaaatgttttctctccttccataggttgcctctctgttgattgttttctttgctgtgcagaaggtttttaatttgatgtaatcccacttgtctattttcactttcgttgcctgtgttttgaggggtatattttaaaaccattgcccagactactgctttctgcctatattttattctggaaggtttatagcttcaggtgttatccttaaatgtttttaaaaatttgcgtaaattggttgggtgcagtggttcatgcctgtaatcccagcactttgggaggctgagacggtcagatcacttgaggtctagagttcgagaccagcctggcaaacatggcgaaaccccatctctactaaaaataaaaaattaggtgggcgtggtggcatgtgcctgtaatcccagctactcgggaggctgaggcaaaaggattgcttgaacttgggaggtggaggttgtggtgagccaaggttgtgccactgcactccagtctgggcgacagagcaagactccgtctaaaaaaataaaaaataaataaaatttgtgtaaatttaaggggtgtaagtgcagttttgttacatgggtattttgcctagtggtgaagtctgggcttttagtgtaaccatcacccaaatagtgtacattgtacccattaagtaatttatcagtcctaaccccctctcatcttcccacccttctgggtctccaatgtctattattccacattctatatttatgtgtccacattatttagctcccacttgtaagtgagaacatgcagtatttgactatttctgagttatttcacttaagataatggcctctagtttcatccgtgtttgagtctttaacctattttcatttaatttttgtatatggtgtgaaatgagggtctaatttcattcttctgcatatggatatccagttttcccagcaccgtttattgaagagatggtactctcactattgtgctttttttttttttggcaatttgtcaaaaataaaaattggctgtaaattcatggatttatttctgggctctgtattcttttccattggtcaatgtgccccaatacagtgtgctttccatttaccttttcccctctgattcacatgaataataaaacaaagtccccagattttctagataataagtgtatccatacatggagctccctaacttttatggctttcacccaagggacaggatcctaaattatttagctctgggagttgatggggctctgcattcatgaatcccttgaaaccaaagagaacaaagaggtaactttctttttcaacttttattttagaatcatggggtatatgtgtaggtttgttacaaagatatattgtgtgacactaaagtttggggtatggctgaacccatcacccaggtagtgagtacccaagaggtagtttttcagcccttttcctactccctttctccccactatagtagtctccagtgtctgttgatcccaactttatgtccgtgtgtacccaatgtttagctcgcacttataagcgagaacatgaagtatttggttttctgtttctgcattagttcacttaggataatggccttgagttctctccatgtagctacaaaggacatgtttttttcttttttatggctgcatagtattccctggtgtgtacatactacattttctttatccaatacaccattgatgagcacctgcaatgattccatgtctttgctattgtgaatagcaccacagtgaacatatgggtgaatgagtccttttggcaggatgatttattttcctttggctatatactcaataatgggatttctgggtcaaatggtagttcaactcagttttttgagaaatctccaaaccgcttcccacagtggctggactaatttacattcccaccaacagtgtataagtggatattatgctcatgaaataagccagagagaggaataaaaaatgctacattatttcacttatatgtggaatctaaacaatgtcaaatactgaccaggtgtggtggtggttcatgcctgtaatcccagcattttgggaggtcaagatgggatcaccatttgaactcaggaatttgagaccatcctgggcaacagagcaagatgtcatctctactaaaaatatgaacaagtgagccaggcatggtggtgtgagcctgtggttccagctactcaggaggctgaggcaagaggatggcttcagcctgggagatcgaggcttcagtgagctaccatcacaccactctacttcagtctgggtgacagattgagatcttgtgcttaaaatgtaaaatacatagaaatagagagtacaattctggttatggaggggtgagaatgggaggagtggggaatgggaaaatgtgggtcaaaacgtacagagttgtggttatgtaggatgaataagcctagacatctaatgtacactatgacgactatagttaaaaatattatactgtacactgtgaattttctaagagtagagtttaggtgctctttccaccaaaaaaggtaactatttgaggcgatggactcaggatcttttcatttgctttagccaaaagaatatggtggaattgagtgtccctcaagggaacttggcatgtttctgttgctctctcctgtaactctgcctctgccatgcaaacaagtccaggccagccagctttaggaggagaggacatgtaaagccatgttaagacagttggcaagctgtcccaactgtggccaccctaggtcagcccacagccaacaagcctccaaatgtaagagaactcgggcaagatcagcaaagccctactgttgactcacagctgactacagcttcatgaggaggacagcagagaccagaagacacccccaacgtagactccctatgagacaagaaaagcatcatcttaaaccatttactatgagatgacttgttattcagcaatagcttactgatacaataagcattgcaaataggactgaggacattcagaatagtctgctgcttcttattttggcatttgttctaatacttggaagcattcatgattccctggatactcatgtataattcagataactgtattaaaaaaaagactactgttgagattccccatctaggtgatctggagaggttagaatgagatgtatgttttttgcaggaataatttgtgcacctgaatcacaattttccattcccagagacataacgggataagttaaaggtttggtgtgagtcacccttttcacctgaatcacaattccccattcccagaggcatgactggggagaagctcaaggttttgtgtgagtcattctttaatcatgagtatttaagagaatttagagcataaaagagatgaataaattgatgatacattgaatattgttcactgacctgcactttaatgtttacgacaaaattttataatgaaggaggtattttggttagtgggatagaaggattcgtatttgtagggagcactaaaaattttgaagcaaaaacagaagtatggatgcatgaaacattatagaccatggcaccaaatccatcactccaataaataaacttatatatgggcactaagcttccatacttcaatgagtccatgcacatcataaaaacaagtcttccatagcaattcaatgtatgattgacaattttactccatcatatttaaggtcatctctgactgtaagtccatattaagttaatcaacatatgcaagtttgtctttcagtgggcattgcactcggaacatatttttgataaacaatttttgccttaccgtactatgccagggagtatggcagatactgtggacatggcactgacaaagacatgatgtcctaatgaggacaacacaatctcatgaccagctgcaaaatacacaagtatgttcaggtctacattatcaggaggagcattgaaggtagagacagacataggactgaagaatacaaaagtgaacaaattgtggtctcaggtcatattccactataaatttacatcaattaccccaattgccaagtgtagtctatgccacaggagacatacaactcttccctgtatgagacaaatggaaatctccaaagtgtttctgatccaaagtcggaaataaccttgagaaagtaggaaaacaacaaagagaaaaaactgttggatatcagagagcagaaagcttaataaaaggagttgcttaaattctacaagaccagttgaaatcacaacaaattgaaactcccagaaatataataagtattaatagaaggagcaagttctatttccactatctgattgaagaatgacagttactacctctgaagcttagagccctgcaatcatgggcacttcttgaaaaattgccctttcattgttccccacaacaaatgtattcccagagccctctttatgtctttattcctcagactatagataaaggggttcagcatgggggtgaccacagtgtacatcactgaggctgttgcacttgagtgtgagttgcgggtggcagcagaactaaggtacacccctaggattgcaccataaaataaggagacaactgagaggtgagatgcacaggtggaaaatgccttgtacttcccctgagctgatgagattgcatgtatggaagaaattatcttagagtaagagtaaaggatcccagtcaggggacctccacccagcagcgcaactgtaaaatatatcaccatgtgattaagaaagctatcagaacaagcaagttggatgacctgattaagttcacagaaaaagtgggggatttctaaggctgtgcagaaggacagccgtactaccattaagatttgtagcaaggaatacagagcactcatggtccaggatgctagaaccagcagtccacagaggtgagggttcataatgaccatgtagtgcagggggtgacagatggccacaaaccggtcataggccatcacggacaggaggaagttttcaaatccagcaaagagtatgaaaaaatacatctgcatgaggcaggctatgtaggtgatgactttgttctgtgtctggatgttcatcagcatttttggaatggtggtggaagtaacacaaatgtcagcaaaggacaggttggagaggaagaagtacatgggggtgtggaggtgggagtctgagattgtggccaggatgatgagcaggttcccgagcacagtgaccaggtacatggacaggaacagcccaaagaggaagggttgcagtccaggttcttgtgaaaatcccagaagaagaaattctgaaatttgtgtatcatttcctggttccatttgattgaagtgactatcagagagagagagagaaagagggaaacgagacaggcatgcattgctaacctttcagaaataccatcatttatattttatagccaataaattatcttacattttgtgtatgaatctggttctctttaagggatctccatgtcatctctgattaggaactccttcccactctcagccttaactgaagacagcgtacattctgcagttagaataagaacttctggctgggcacggtggcttatgcctgtaaccccagcactttgggaggtcaaagcaggcggatcacgaggtcaagaggttgagaccatcctggccaacatggtgaaaccctgtctctagtaaaaatacaaaaattagcctggtgtagtggcatgcgcctgtagtcccagctacttgggaggctgaggcaaggagaatctcttgaccccgggaggcagaagttgcagtgagctgagatcatgccactgcactccagcctggtgacagagcgagactccatctcaaaaaaaaaaaaaaaaaaaaaaaaaaaaagaatgagaacttcttctatgaatttgaggaatataaattgaatgttgaccatgttcttgtcactgtctagataatgagtgaacaatgctgagaaacaaaagtccctacaatctaatgatgaagaaagaatataaacaaattaaacaatcgaatataaacaaattaaacaatcacataatatgtcagatgggaacaggcgcttggaaaataaacaaagcaggtaaaaaggagggagggtatgaagtgtttcttttgttttttgtttgtttgtttgctgattattattcaagacctgcaaacaaggtgatgtttgaaaaaagatctcaaggaagacagggcaagattcatgaagttatctgttgaagtgggtgcctggcaggaggaatggcagtacaaaaactttgagggatgtgcttctttcttgttttcttttttgagacagagtctcgctctgttgccgggctggagcgcagtggcgcaatctcagatcactgcaacctccacctcccaggttcaagcgattctcctgcctcagcctcccgagtagctgggattacaggcatgcaccaccacgcccagctaattttgtatttttagtagagacggggtttctccatgttggtcaggctggtcttgaactcccaacctcaggtgatccgctcacctcggcctcccaaagtgctgggattataggcatgagccactgcacctggttgggacgtgcttctttcagatgttcaagtccaacacagaagccagtgtggccagggaatcagtaagacggagagtgatgggacatggtgtcagaggatgttgcagaataaggggacctggctgtcaaaacatcaagggacaaagtgtccatctgtctagatgctgttgcacctgcactttattaactggactagaaaggtgtcacatcaattgaaatgcatcccctctttatttccttctggtgtcttgggttctggcctctgtttcattggtctcctttataataaaatatattgaggccaggtccctcttgctctgaaacctgctgtcactccaaagacatgcagccacacactcactcacacacacatatacacatgcagcacactggccgaagagggcccaggcaggagtgcagtggtgtgatcatagctcactgcagcttcaaccacccaggctcaagccatcctcctgcctcagcctcccaagtagttgggaccacagccatgtgccgccacccttggctgatttctacattttttgtggagaccaggtctgcctatgttgcccaggctggtcttgaactcctggcctcaagtgaaccttccactttggcctcccaaagtgctggaattacaggcatgagctactgcatttggctcaaggaaagcttttaatatcagattcttttttccctacagaatgtagaattggtacaagaaattccagttcacaagtctgtatacacatgtaaacttggacttccattttggtatgactgttttcagccctgtgtttaaagaaacataaaagagctgttcaataaacagagtgagagaaattaaacagaccccagtaaggaaaaagtctaataaactcaggtaatccctcagcaaaaggacaaaaatacattgcaagggtgcaacgggtaggttagcaagaaaggaactgactccaaggagacaaaggcttgctggggatcttataggatggaaaataaaagcgaccctggttatggttacatttcagcttccattgtatctcctcgatgcctggcaaaataaataaaagatcaaaaataaagaattctgacatctttattgacttcatggtttttaatttaacaatagtatttaattatgtcggttttaatgattattaaagttttagctttccttttggaactagaaataagtaaataaagttatccaaaagacaagactgtggagtcctaattagggaaatggagtcaggctggctgaagcagggaaaaacaaaaagagaagatagataagctctaagtctgcctttcttcatggtccaggacacacaaccctcgtgtgccaatgactcacaatcttcctgcacccgtcttatcacctgaccctcagctgatggaaaaatgcaagttagctcactgcaaccttggcattatcagtaccgcacaaagccctcttcagctcgcagcacaagcactatcctataaaatccccagcaagcctttgcctccttgcagtcagctcctttcttgctaacctgcccattgcacccttgcaatgtattattatcctttctctaattaaatttgcctttctttatctacaactgtcttggtaaattcttactgcctacatgatgccggccccagatagctgctacccatgacaaaaactaatgataccttttttggcaacaaaggtacagatcgcatatcctaatagaaaaatggagcaaagagaataagccaacaattcacaaaaagaaacatacaaacaatgacaagatttgggcatttttatatgaaacagtaaaagactcatttttttctgtgcctattccatatttacttgatcaattggtttttatatgaattgagagtggatgaagcagtccctttctcacttttcttgtatttcctgtgtggcctttattttattttattattttattattatttttttgagacagagtctcgctctgtcgcccaggttggagtgcaatggtgcaatattggctcactgcaagctcagcctcccgggttcacgccattctcctgcctcagcctcctgagtagctggcattacaggtgcccgccactgtgcccggctaatttttgtatttttagtagagatggggtttcaccatgttagccaggatggtctcgatctcctgacctcgtgatccgcctgcctcggcctcccaaagtgctgggattacaggcgtgagccaccgcgcctggcctattttattttttttttgctacttgtggactttgaattttgatcacttttttgacaaatccaatgagcttgtttctggtctttgtccaacatgaaaatgcctgcccagaccatattacatattaaattttgcacacgtcatgactattctattctattctgttgtattctatttattcattgttgagatagggtcttactctcttgctaaagatggagtgcagtggtgcaatcatagctcactgcagcctcaaatttctgggcttatataatactcatgcctcagcttcttgaatgactgggacgaaaggcatgtgtcaccatacctagctaattttgttcatgctttgtagagacagggtcttgttttgttgcccaggctggtctcaaactcttggcttcatgtgatcctcccagctgggcctcccaaagtgctggaattataggcatgagtcacctcgcttggcctgacaattctattattttacactaagaaatattctttatttgatttacaccttatgacattgcatcatgcacctttatttaattctactgtattttcaccattatagcacaaggtcaaaatgagcagggatgttaccatggatgttcacttatgtatttttttccctccttccctccctccctcccttccttccttctctctctctttctttcttttttcttttcttttttttttttaatggagccttgctctgtcaccaggctggagtgcagtggcgcgatctcggctgactggcaacctccgcctcctgggttcaagcgattctcctgcctcaacctcccaagtagctgggattacagtcatgagccacaacacctggctaatttttgtatttttaatagagtcggggtttcaccatgttggccaggatggtctcgatctcctgaccccgtgatccacccacctcggcctcccaaagtgttgggattacaggcctgagccacagtgcctggctaccttcatattttcataaaaagatgtgacgatgtatgcattattaaaaaaagaattataaaattagaaagaatggcaggagaataaaaccaggttaaatataatcaactgtagtgaataaaattgttgaagtattgaaaattaactgacatgctataataataatttaatcatatcaacataaattaataaattggcaaaaatctagatataaaagaatatggcatacactgttcataaaaaactcttgcacagagcagatgctcagttattatttgctgaatgaatcaggactttgttctcagtatacatgggcatttaatatacagcaagcttgtatttcaatttagttagaaaggattggatatttaaataaatgctgtcataaacagctatttgtctggaataaataaaattggtcacctacctcacacatcttacacaaagtcagaggaattaaaaacttcaatatcggccaggtacggtggctcatgcctgtaatcccagcagtttggaaggtccaggtgggtggatcacttgaggtcgggagttcaagaccagcctgggcaatatggcgaaacgccatctctaccaaaaatacaaaaattagatgggtatggtggcacttgcctgcagtccaagctactcaggaggctgaggtgggagaatcgcttggatccaggaagcgaaggttgcagtgagccaagatcgcaccactgcattccatcctggttgacagggcgagactccgtctcaaaaaaaaagtaaacaatgccttttccatgaaaacagggaaactacatatgaaatctgtgggtgggcaaatcaccttaactaaggcaataattgcagaagtaagatgataggtatatatttaactaaagaatattttaaactttttatggctaataaatttccccaaaagtcaactgaaaaagaatcattgaaaaaaataattttaaacgctggtaactgtataaaaatgggcatatagtaaacataaggcaatcaagatcttgatcaaatatatgaatatttgctcaaagtcagtaatattttaagaaaacagtaagaaatctcacgtccatcagcctgagcggggatggagtggggaactttctcagctgtcatagatttgtgttggaatttttaaacagatggcaaacgggtactctaattttggtgacagaaataagtgtcataatgtcttgtggaaacaatctccagacagataaaatattaaaaacacatacaggctgggcgtggtggcacacgtctgcaatcctagcactttgggaggctgaggcaagtaaattgcttgagcccaggagttcgagaccagcctggacaacgtggtgaaactccatctctacaaaagaaatacaaaaattagcctagcatggtggtgcacaccagtagttccagctacttgggagactgaggtgggaggatcaccggagccaaggaggttgaggcagcagtgagctgagatcatgctactgcattccagtagtagcatggacagaggcttgcacgacagagtgaggctctgtctcaaagaaaaaacaaacaaacaacaaaactccaaaaaccaggaagccagcagatattcctcgccacagtgtttctcaatctcagcactattgatattctgggctagatcactctctttgataaagtctatcctatacactgtgagttgtttagaagcatcaaatcacaggcctaaacaacacacaaatatattcagccacgcaagtgaggaaataaatgcaagtacagctcattagtacatagtctctcacctattaaatattttgtattatctgaatacctagcgtaagagaaaatcctgcaaaatatacgcattatgaactgctgttgcaaaatggtatttgcaagcaatccgttcatctggatttttctcacgggcatagaatcaaactgaaatatgctccattttaaaagtaaaaaggaaatgtctttacatgactgtatatccctccacagccaatacacgatttctctactccccttaattacaaagatgtatgttgtacttttacaaaaatcattttacacctcctattccttctaattgggcttctgtgaccttcactaaatgtcaatagtcgtcacccttgcattgcctagttcagtgttcacttttctttttttgcatcataaaacgagacattacttagttaattaatcaaccaagcaaataaccgcagcaatatcttggctctgggctaggctggactggctctcaggtgatctcaggtaaatattctctgcatctattccatctattgttttcctgcagttcccactgggctctccaactcaccaggaggggatctctccgaggaagagttccttgtgtaagtgcaaattcctcactggatgattgatggtggagactgaagctctgctcagcagactaggcagcaggaaagagtcaagcatctgtctctgagctagacttaggacttcaaaagaaacaatgatattccattcaacccaggggtgcctgagggacaacagcagatgaaatatttatagcttcccacatctgctcaataggcacatttcttcttgttatttgaaaccctgagtacattatgtccctgtgggacattgttttgcacagaaagaaaaaaaatcctgcagattctctgttcccaagagactggatgaaccagtctttcttactctttcaacatgaactctcctttcttccagaagtctaactttgtaacaactgtcccaatcctgagacaaagttttcttcacatctaagactgagaaacccatcttgcctactccccttaaatctccaaagcatcgacttattgtgggaatacagcctctgataccataagaaaatttctcttttttttttgagacggagtctcactgtgtcacccaggctggagtgcagtggtgtgatctcagctcactgcaacctccgcctcctgggttcaagtgattcttctgcctcagcctcccgagtagctggaactacaggtgctcacccccatgcccagctaatttttatatttttagtagagaaggggttttgtcatgttggccaggctggtctcgaactcctgacctcaggtcatccacccgccttggcctcccaaagtgctgggattacaggcgtgagccactgtgcctggcccaacatctgaaaatttccatctcattcttcaactagagggagtactgtgttcctttgatataaatcatggcttggctgtactccttggcttcatgatgttttcaccaaaacaatttgtaatttaatgcttgtcagacaaattaagaactgtcttttagttcttcattgataaaatgtgtaccaattacaagagatatatttagacccttttatgcacattgtcctgagaatggcaccttataaggattattttatctaatgtttataaatgtttattttatgtggtcggtactgtcatgagcatcattctacgtatgcagtaatggggctcagaaagattcagtgatctgctcaacattataaaccaagaaagggatgaatggttgaaactccttcatgatgttttcagttctcatgcttgaggccagtagtttaaaaacaggaatgaggctgcatgtggtggctcacacttgtaatcccagcactttgggaggctaaggcaggcagataacctgaggccggagttcgagaccagcctggccaacacggtgagaccccgtctctactaaaaatgtaaaaattacctgggcatggtggcatacgcctgtagtcccagctactcaggaggctgaggcaggagaatcacttgaacccgggaggcagaggttgcagtgagctgacattactcaagcctgggtgacagagcaaaactccatctcaaaaaaacaaaaacaaagaaacaaaaagcagggatgattttgccaccaaaggacacttgaaaatatctgagaaaactttagttgtcacaactaggaagatgttactggcacctgggggttgaggttgagaatgctgttcaagatccaacaatgcaaatgatacccccaccacaaatgataatccagcacaaatgttaacatggaggaagctgcaaacactattctagaccagaacatctccagcttcaaagtttatatgaattgcttctggatcttgttcaaatgtggattctaatttatcaggtctaggatggggtccagagattctacatgtgtattagtccgttttcacgctgctgataaagacatacccaagacttggtaatttataaaggaaagaggtttaatggactctggactcacagttccacatggctggggaggcctcacaatcatggtggaaggcaaaaggcatgtcttacatggcagcaggcaaagcgagaataagaatcaagtgaaaagggaaaccccttataaaaccatcagctctcatgagacttatttagtaccatgagaaaagtatggggaaaactgcccccacgattcggttagctcccactaggtgcctcctgatataggagttaagaaggaattacttaggcagatagcaagggcatgagagtcctcagtaaggcttttctcttttaatgaaaagcagcctcaaatcattttctaacaaagagcagcctgtaaagttgagctgcagacatagataagcaagctgggagtttgcatgggtgaatgctggcagaaactaaggactagacgttttcaagatggtggctccatcttcccttctctgccagccacgtgcactgtaaggagcagacaagatggtgtcatggcactggccaggtaaaaaccccatctgcataataaacaattggggtgggatggccagcctctttgcaggctatgtaaatgacacacttggtccaaccaatcccctgggccctatgtaaatcagaccccacctcctcaagcccctctataaaaccaaccgaatcccatgggcaacagggagatctgtttggaacccgcctccatctacataagggagcttttttcttgtttctttcatgtattaaactttccactattaaatccacacctcgtgcatctgcgtcttcattttccttagagcaggacaatgaaccttgagtatttccccagacaaacgatgccacttcaccattagccaaatacatctctgttcattataaattgcccagtctcaggcattctgctatagtagcagaaaacaaactcacatttagcttctgcatatacaagtttacatgtgtctcttgagtaaatccctcatgataggaaatgaaacttttagaactttcatttcttatctataagttctggaaatttcatcgatcctatgaagttattgtgaaaagtaagcaatattttaatgcttggaaagttactggaacagaataattgttcgatcaatagcagctattgttattgtctcagttttgcatttacttagctcactgtgacaccagaaatgtctcttgcgagaggatgtgagtctagtgttaccctgttcctgttcctggaatacagctagttgtgatcttgaagggagacctcatcccagggactcaaggaggggtcagaatgtggggaatccaccattccatgctttgttatattcaaggatgtagcctctgaccctattctttttgagactgagttttcctctgttgcccaggctggagtgcagtggcacaatctcggttcactgcaacctccacctcctaggttcaagcaattctcttgcctccgcctcccaaatagctgggattacaggcttgtgccaccacgcccggctaattttttgtatttttagtagagacggggtttcactatgttggccaggctggtctcgaactcctgatctcaggtgatccgcctgccttggcctcccaaagtgctgggattataagcgtgagccaccgcacctgggcctgcctctgaccctctaatgctgactccaaataaccacagcaagaatttttagactctttcaatccactttacttgttctgctcttgggaatatttgcaaagctgctatttcttgttgcatcaaattatttctataaattttctcatcctttttgttccacctccacagcatgtaattcacaaatgtttgctgccaacagaagtatgaagttcttgcgtgtctgtttctttctaggataatttttttttttacaattatttattaactcctctattctctgtaggaggactgtaaatcaccactatggactctgggtcttaagggtgcctcaattgtaaggagaacatagctcttcaatagttgacactgaacttggacatgtgacttcagctaaatgtgaatagtcctgaaatgtccaatgcctgagaagaagctgtaagagattccatcacttggctaggcacggtggctcacgcctgtagtcccaacactttgggaggctgaggtgggtggatcatgaggtcaggagatcgagactaccctggctaacatggtgaaacctcatctgtactaaaaatacaaaaaaaattagccaggcgtggtggcgggtgcctgtcatcccagctactctggacgccgaggcaggagaaaggcgtgaacccaggaggcggagcttgcagtgagccgcgattgcaccactgcactccagcctgggtgacacagcaagattccatctcaaaaaaaaaaaagagattccatcacttttcttgagcttcttctctcaaattgtccttgctgtccaaaggtcaagaacttgatttggatagccctatggactgaatatttttgtcccttccaaaattcgtatgtcccaagtccccaaagttaaaacttctccaacattgcctcctatgtgattaaaaaatagcatgacattaaaccattcactattaggatgacttgttatgcagtagtagcttactgatacaataatcaatgcaaacacaactaaagagattcagaataatctgatgtttctttgttctggacctttgttctgttatttgaaggaaatatttatgattacctggttattcatatttatttcagataactgtattaaaatgagactgcctattagattttcttcaggtagctaggagaggttgaaagtaaatatgttgggaaaacactgactttttttcacatgctaatccaccaggttacttttgagtaacgctgagtccagaaaagcctccaaaaatgtctagttgatggattactctttttatagaaatacgtgttcactgtaatttttgcctttcctccaaaacaacccttggtgttcttccatacatcataggctgcgatgcctgtagctgcttacacattccttccagagcacatataatgtttcctccaagatataagccccaggtctggggtggtggaggtgtggagatccacttttcctgcggccacctaagaccatgcttctgtctgtaagtttacctggtaaattaccctacccaacaaactggcttgtctgccttgtcctttgacttctcagatccttctgcacttgggaactgctttgcatatatagtcctttcatggaataacacatatgtttttgaaggaaagaactgtgaccttcaatcacaagtctctattcccagaggcaacactgggtagaaattcgagctcttgtgtgagtcatcctttgatcatgagagttgaagagtgtttagagtataaaagagacaaaacaactgaagataaagtaaatacatatattgttcacttgtcaacactttgatgcttatgacatttttaaggaagagatgttaggacaatggaaggagtcatatttgtaggcagcactggaaaacattaggcagaagtagcagagtgatgcaaggacattacatacaccatggcactcaatccttcactcagatgaacaaacctagtgacgcgtggacaccaggctcctctacttcaatgagtagatgtaccccaacgaaaacaaatattccatagttatttcatgtatgattgaaaattatattccgtcatatttaaggtcatctctgactctaagaagaacagtgtaagctctataaagtagttgaggaacaaagaagtttaaactccaggaaataaatggaaggggcaagtcttccttccaccatcttattaacaaatcaccatttctggctctggggcttagagctctgaagtcacaggcctttcttgaaaaatagcctttctattgctttcctctgaagaatgttttcatagcaccctttatgtgtttattcctcagactgtagatgaaggggttcagcatgggggtgaccacagtgtacatcactgaggctgcagcacctgtgtgtgaattgtgggtggcagcagaactaaggtacacccctaagcatgtaccataaaataaggagacaactgagaggtgagatgcacaggtggaaaatgccttatacttcccctgagctgatgagattgcacgtatggaggaaactatcttagagtaagagtacaggatcccagtgaggggaccaccgcccagcagcgctactgcaaaatacatcactatgtcattaagaaaggtgtcagaacaggcaaggtggaccacctgattaatttcacagaaaaaatgagggatttccatgtgtgtacaaaagggcagtggcaacaccattaagctttgtaacatggaattcagaacactcatgatccaggatgccagaaccagcagtccacagagttgagggttcataatgaccatgtagtgcagagggtgacagatggccacaaaccggtcataggccatcacggtcagaaggaagttatccaatcctacaaagagtaagaaaaagcacatctgggtgatgcagcctgcataggtgatgactttgttgtgtgtctggatgttcaccagcatcttcgggacagtggtagagacaaaacagatgtctacgaaggacaggttggagaggaagaagtacatgggggtgtggaggtgggagtctgagattgtggccaggatgatgagcaggttcccgagcacagtgaccaggtacatggacaggaacagcccaaagaggaaggcctgcaattctggttcctctgaaattcccaggagaagaaattctaaaattattgtattgttccatgatttcatcttgtgatgtgactaccagagagagagagagagagagagagagagtgaaagaacatgaaacaaacatgcattccaaaactatcagaaatgttatcatttatattccacagtcaagaagttaatatctttttcttaaaaaattatttttaagttgacagataaaattatatgtatttatcacatataacatgatgtgtttttaaaagttttatttagtttcagggttacatatgcaggtttgtaaaacaggtaacatgtcatgggggtttagtgtataggttatttcaatacccagtaataaccatagtacgtaataggtgttcgatccttactctcctcccaccttccaccctcaaataggtcccagtatctattctcttgttttcttttttgagatggagtctcgctctgtcacccaagctggagtgcagtggtgcagtcttaactcattgcaacctctgtctctttgttcaagcgaatcttgtgcctcaacttcccgagtagctgggattacaggtaggcaccaccacgcccatctaatttttgtatttttagtagagacagagttttgccatgttggctaggctggtcttgaactcctgacctcaggtgatccgcctgcctcagcctcccaaagtgctgggattacaggcatgagccatgtacctggactattctcttctttgtgttcacgtgcactcaatgtttagctcccaattattagtaagaacatatggtatttggtttcttgttcctgcattagtttgcttagaataatggcttttagctacacccatgttgctgcgaaggacattatcttgttctttattatggcttcgtaatattccatggtatatatgtaccatattttctttatccagtctaccgttgatgggcgtctaggttgattctatgtctttgtaattgtgaatagtgctgtgatgaatataagtgtggatgtgtccttatggtagaacaatttatatttctttgggtatatacctagtaatgggattggtaggtcaaatggttgttctgttttaaattctttgagaaattgccaagggtctaatatcagaatctataagaaacttaaacaaattaacaagcaaaaaacaaacaaccccattaaaatgtgggcaaaggacacgagcagacacttcaggaaaagacatacatgcggccaacaagcatattaaaaaatgctcaacgtccctaatcattacataaatgcaaattaaaaccacagtgagataccatcttacactagtcagaatggctataattgaaaagtcaaaaaatagcacacactgctgaggttgtggagaaaagggaaaacttatacactgctggtgggaatgtaattagttcagcccctgtggaaagcagtttggtgatttctcaaaggacttaaaacatgatgtgttgaagtacaaatacattgtggaatggcaaaatctagctaattagcatctacatgacgtcaccttgtcatcatttttgtgaggagaacacttgacattcacccttttagtgtcttttgagaatacagtgtatcacggtgaactgttgtcactatgctgtgcagcacatcttttgaagttattcctcctgtctaactggaattttgtgtctattggccaacatctttctaactttccccactccacttcccccagcctccattctacaagaagttaatttctatattgtttgtgaatctggtccccgttaggagatccccttgccatctctgaattccttcccactctcagcctttctctgagggcatctactctacaagtttagggagaaaaatctttcatgcatttggggaatatcaagtgaatttcgacatgttccagatgctgtctagacagtgagtaagtggtgctataaaacagaagtccttgtgttagtttgctgagaatggaacagaaaaccaaacaccacatgttctcacttataagtgggagtcgaacaatgagaacacatggacacagggaggggaacatcacacactggggactgtcgggggtacgggataaggggagggagagtattagaacaaacacctaatgcatgcggggcttaaaacctagatgacaggttgatgggtgcagcaaaccaccatggcacatatgtacctatgtaaccaaactgcacattctgcacatgtatcccagcacttaaagaataatttaaaaaacccctccagaagtccctatgctctaaacacagagaaaatacaagtaaatttgtaaaataccacatgctatgtcagatgatgatagatcctatactatgtcagatgacgacagatcctatactacatcagggcgtgacagctcctacaaagtaaagaaagaaggcaaaaaagaaaacatggatgaggtgttagtttttactttgctttcctgtaagaccagcagacaaggtgacaatggaacagaagacagggtcagagtgaccaccttccctgcagaagtgtgtgccaggcagaaggaaagatcaatgaaagacgctgaggaatgtgcttctggcagatgttcaaggctaacaaggaatccagtgtagcgagagaatgagcaagaagagagggatgggagatggtgtcagaggatgatgaggaatgaggtgacctcctaaatgctgaaatttgataacacaaggagttcctcggtcctgatgttgttgcatttgcactttggtaatttggttgcaaaggtgtcccattatttgaaatgcatctcctctttgtttttcactgttgccttgagttctgtgttttttttttttttttgagatggagtctcactctgtcacccaggctggagtgcagcagtgcgatcttggctcactgcaacctctgcctcctgggctcaagtgattctcctgcctcagccccctgagtagctgggattataggcgcctgctaccacacccggctaatttttgtatttttagtagagatggagtttcgccatgttggtcaggctggtctcaaactcctgacctcaggggatctgcccacctcggcctcccaaagtgctgggattataggcgtaagccaccatgccaggccaacttctggtcttttaattacaagttgccttttggaatatattggtcccaggttctttttctctgaaaattcctctcgccctagaggtgcacacacacacacacacaaacacacacacacacacacacacacacacaatgcatacacatgtgcatcacatcgtggcctcctagggctgtgttactcctctgctcttctcacccctagtctcactattaagaaggaatggaggccaggcacggtggctcacgcctgtaatcccagcactttgggaggctgaggcaggcggaccgcctgaggtcaggagtttgagactagcctgaccaacatggtgacaccctgtctctactaaaaatacaaaaattagctgggcgtggtggtgggcgcctgtaatcccagctactggggaggctgaggcaggaggattgcttgaacctggaaggcggaggctgtggtgagttgagattgcgcccctggactccagcctgggcaacagagcaagactccatctcaaaaaaaaaagacaagtgaaaatggtggtgatatatatgaattttgcttaaaccaagcaataatttaaggcaacaagaaatctctgtcacacgcatcagcctgggaaaaaacttaaggagctaccacattgagtagggttggaacttacaaacagggagagaagggaaactctaattttgctggcataaatgtgaagtgatacacctggatacagctataaatactaaaaatacagatattcattcactcgttttctcaatctcagcactacttaaattctaagccacattattcattgtggtggggtctgtccctgttgtctgctgacctttacagggtgaaagccaaatatgtcattgctcaatgtcccctgggggacaaaatcatgccacccactcaagtgagaacgacaattttaacataaaaattccaaaatgtgggaggccgaagcgagcggatcaggaggttaggagtcaagaccagcctgaccaacacggtgaaaccccatctctactaaaaataccaaaattagcctggcatggtggcatgcacctgtaatcccagctacttcgggaggctgaggcaggagaatcgcttcaacccgggaggcggaggttgcagtaagccgagatcgcaccattgcactccagcctgggtgacaagagcaagactccgtcttaaagaaaaaattccaaaatgtttttgtagcatttataggataggaaaggaaaggagaagacaagctaaaaacaactgcactaaaatatagcatatttgtgatatgcataggattttgtctacgtgtttgtataagtgttgtatgaatacaaaagtgtgcataatatagaaagagaagttttaaaagaaacgaacttatacaacaaggaatgacagttaaaatgcaattaggttaagcacagtggtttcaaaacaactgtctaaagcaacatagaatgaaaatctgaaaaaattttaatataatcacataaaatagtaataatttaataacatcaaaatgggttacaaatttaagattaaactaccagtcatggaaactaaagaatatgacaggaagtcttttaaaattatctgcgtgtggtggttggtgcctgtaatcccagctactcgggaggctgaggcaggagagtcacttgaacccaggaggtggaggttgcagtgatctgagatcgcgtcactgcactccagcctgggtgacagagcgagactccatctcaaaaaaaaaaaaaaaaggaaaaggaagtagtgtctaaggttataatttgatcttatataaagatgtaaggattcaagcatgtttatgacagatataaatgtgacacaacttctagatatggattgaatacaaaaagctaaaaggcacaataaggaatgacagagatgtgaaaagaagttggaaatttatatatagaaggtgatttattcagccaaaagatgcagaagaactttctacatttataaggcaattagggagacacaatgtgaccgatggatggatttggctacacaagctttttaaacttgcacactgtcctctcaaatacattgaaacttacacaaaagaacataaaacagctaagaaaaaagtacatataagaacattccttgtgtaataactcacataaaagaactaaatgacaaatgccaaaattggcaaaaactccaaagcttatatgttaaagaatgtaataaaaaacacgaataaaatcactttgaatccatcatacaaaagccaagaattttcatagataatttccaacagagtgataaatgtctgacaaacacagatgtagtcagtcttaccagtaaggaaaaattgcaaagtaaaggccattaatataccagttttcaactcttaaataaaattttaattcatttgaatacctagcataagaaaagcagctgaaaactgtacgtttcataaactgctgttgccaggtagtagttggaaaaaatttattggtctggatctttctcatcaatatggaaacaaactcaaatatgcccttctatttttatttatttttatttttttgagatggagtctcgctctgtcgcccaggctggagtgcagtggcgcgatctcggctcaatgcaagctccacctcccgggttgacgccatcctcctgcctcagcctcccgagtagctgggactacaagcgcccgccaccacgccaggctaatttgttttttgtatttttagtagatatggggtttcactgtgttagctaggatggtctcgatctcccgaccttgtgatccgcctacctcggcctcccaaagtgctgggactacaggcgtgagccaccacgccggaccaaatatgcccttcttaaaaatgaaaaattggcggggccaggtggctcatgcctgtaatcccagcactttgggaggccgaggtgggtggatcacgaggttaagagattgagaccatcctggccaacatggtgaaaccctgtctctactaaaaataccaaatttagctgggtgtggtggtgagcacctgtaatcccagctacttgggaggctgaggcaggagaattgcttgaatccgggaggcagaggttgcagtgagccaagattgtgccactgcactccagcctgggcgacagagtaagactctgtctaaaaaaaaaaaaatgccctcacttcctttcgtatcccccatagctaataccctacttctctttcccacttaattgcagtgatgcttgggcagatgttctgctttcactggaactactttagaccccacattttctcttctaattgggcttttattacccttacttgattgtcggctatcattctccattgctgagttcaagatgcacttctcttcttagcttcataaatgaagatatgaatcaattcattcaccaagcaaatacccacagcagcgtctccactctgttgcagctaggattggctctttcgagatctcgggtctatgttcacaacttgcaatctccctgatcctttcctacggtacctattggactcaccctgttgggttttctgaaatgaaggtctcaatctagaagtgcaaattcctccctggatggttgatggtggagactgaggctgtgtcccaagacaagacagtaggagaaaggaaagaatcagtacccctgagccagcagatatagactccgaaagaaacaaggatgtcccatccagcccaaggttgcatatgctgagggacacctgcagcggagaaatttacagcttcatatgcctgctcattggagacatttcctcctgttattcaacccctgatcacattcagtccctgtgggacattgctcttcatggaaagaaatttttttcttgcatactcagttcccaagacatcagattaaacatcaggcgaatcgagtcgttattattccttctccatggatttgtctgccttccaaaggtctaacctcccatcacttccctccaaccctgagggaaagtttcctccgaagtttaaactgaggaatctttcttgactaagccccttgagtctccaaagcattgacttgtggtaagaacacaggttaagagccgtcatttaatccttcatttataaaacatttgataattgtaagagatacatttacatcttttcatgcaagttacccttagattagcaccttataagagtgatctcattaattttttaaaaaaagtatttatttatttaaatggacagatataattgtatatatttatggtgtccaacatgatgctttgaagtatatatacattgtggaatggttaaatctagctaattaatatatgcattatctcatgtagctatcatattcgtagtgagattcctttaaatccacctttggcatttttcttttcttcctcttcttttcttcttcttcttcttcttcttcttcttcttcttcttcttcttcttcttcttcttcttcttcttcttcttcttcttcttcttcttctttcttcttctctttttttttttttgagacagagtcttgctctgttgccaggctggggtacagtggcacgatcttggctcactgcaacctccacctccagggttcaagcgattctccttgcttcagtctcccgagtagctgggattacaggcacccaccaccacacccggctaatttttgtatttttagtgaagatggggtttcaccatgttggccaggatggtctcgatctcttgacctcgtgatccggctggcatttttcaagaatacaatatgtcatcattaaatatagtcaccttgctgtacaatagatctcttgaatgtattcctcctaactacaattgtgtatccttggacaaacatctccccactcctcacgctgcaactgccccagcctctggtaaccaccattctactcaataattctgtgagatcgacttgtttcaatttcatatgagtgagatcagatggtatttgtctttctgtgactgtcttatttcacttaacataatgttctccagactcaaccatgttgtctcaaatgacagaatttccttcttgtttatggctgaatagtattctattgtgtgtgtgtgtataatacataacgaaattatataatattttaaaatccattcattcattgatggacacgttgattgatttcacatcttggattcaggatattctggacataattctgcatatgaacactttgttggatctgtagtttgctgataacattgaccacatatctaaactcaacatttttattccacccctcactcctgacccattttatggtttggaggtcacaatttacagctttttatattgtgtatcacttagcaaattaagagttacaattttcatttgatgttctgttaattgcaattgattgcaatccataacttgctatactattccgataaattttataatattagtaacctgtcatatgtatacaagatctacatggggatcaaaatcagttatattacatgtgtactttctaataagcagttattgtacattcttacttttttgatggggctacacacacacagacacagaaacatacaaacatacacagacacacacacacacacagacacataaagtcttgacaaattggaagacctccataggagaatggctcacatacagaaaaatctaaaaagtatcatagggtgactggaagaagaaaagttggttgttttttctgtacatatgaagaagttggttgtttttcctgcacatgtggagacagtcctgtctgccactgaaaagaatgctggcgtttcttcttgtacatcatttcatgcggcccctactgggtaccctggattctctcctgactccaatctcttctcaatcatacactcagggtatctgcaacaaaacttccacctcaatttccccctcttttttcaaatttctatatctcttgtatctacaattctattctctgtctccatgaggtcaacttctttagctccttcatatgaataagaacaagcattattttctttctgtgcctggcttatttcacttaacatagcagcttccagtcccatccatgttgctgcaaatgtcataattttattcttttttatggctgaatagtattcaattgtgtatatgtactgcattttctttatctatttgtgcactgatggacactttggttgattccatatctgaactattgtgaatagtgttgcaataaacatgcaaatgcacgtatctttttgatacactgatttcttttcctatggttatagatccagtagtgggattgctgcatcagatggtagttctattttagttttttgagaaatctccatattattttccataaaggatctactaatttacattctaaccaactgtgtataagagttcccttttctccttatccttcccagcaactgtttttttttctttttaataatatccattctaatttgggtaagacgaaatctcactgtacttttttttttttatcgttgttgttgttggtttttttcttgagatggagtcttgctctgtctcccaagctggagtgccgtgatgtgatctcagctcactgcaactccgcctcctggattcaagcgattctcctgtctcagcctcctgagtagctgggattacaggtacccaccaccatgtccggctaatttttgtattttaatagagacggggttttgcaatgttggtcaggctggtctcgaactcctgacctgaagtgatccacctgcctcagcctcccagtgtgctgggattacaggggtgaacccctgtgcctggcctccaccttatttccaaccctactttggggataactttgggaaagtgggaaaatgacaaaggaaagaaaactgttggatacttgagagcagaaaactttttaaaggaaaatcataaactttataaagcagttggaatcaaagaaatggaaactccaggtagataacagaaggagtaacttctacttccacaatctcattaatgaatcatgatttctatctctgggaattagagctctgaaatcacaggcattaattgaagaagagtccttttattgcttccttctgaagaagcgtttcagagcatcctttaggtctttattcctcagactgtagataaaggggttcagcatgggggtgaccacagtgtacatcactgaggctgttgcacttgagggtgagttgtgggttgcagcagaactaaggtacattcctaggcttgtaccataaaacaaggagacaactgagaggtgagatgcacaggtggaaaatgccttgtacttcccctgagctgatgagattgcacgtatggaggaaactatcttagagtaagagtaaaggattccagtgaggggaccaccgcccagcagcacagttgcacaatatatcatgatgtcattaagaaaggtgtcagaacaggcaatgcagattatctgattaagttcacagaaaaagtgggggattgctatgtctgtatagaagggcagtggcaacaccattaagctttgtaacagagaattcaggacactaagaatccagtctatagaactgagggttcatgatgattgtgtagtacagaggatgacagatggccacaaaccgatcataggccatcacagctaggagaaggctgtccaacactgcaaatagtaggaaaaagcacatctgggtgatgcagcctgcataggtgatgactctgctctgcgtctggatattcaccagcatcttcgggacagtggtagacacaaaactgatatctgcaaaggacaggttggagaggaagaagtacatgggggtgtggaggtgggagtctgagattgtggccaggatgatgagcaggttcccgagcacggtgaccaggtacatggacaggaacagcccaaagaagaagggctgcaattctggttctgctgaaagtcctagaagaagaaattctgaaattcgtgtatcattccctggtttcatcttgttgatgtgactaccaaaaaaagagaaggagaatatgacacaagcatgccttacaatcctaacaatataaatgttgtcatttatattcttcagacaagaagttaatttctttttctaaaatatgtatttataaaattacagataaagttgcatctatttatcatgtacaacataatatgtttaagtataagtacaaagtgaatggccatttgtagctaattaaaatctgcgttatctcacaaaattatcattttcgtggagagaacacttaacatccacttttgccatttttgaaattacaaaatatcttcatgaactatagttaccatgatgtacaatagacctctcgaatgaattccttctcattaactctcattttctattctttgaccaacatcttcccaactttctttgtccccaacctcctcagcttctcataaccttcattttacaagaagttaatttctatattttgtgtgtgaatctgattcctgttggggatccccttgcatctctaatttggagttccttcttactctcagcctttccctgagggcatgtattctatagttttaagaagaaaatttttcatgcactttaataaagtaaattgaattttgacatattccaggaatttagacgatgagtgaatggtgccataaaaccaaggcctcaacaatctaatgatggagaaataatataagtaaacttttaaaataccatatactatgtcagatggtaacaaatcttatgaagaaaaagaaagaagataagaagaaaagcatggatgaggcatcatttttactgggtgttcaggctagaccagcagacaaggtggcaactgagcagagaccataatgaagacccggtatgaatgtgcagaagtgtgtgcaaggtggaaggaaggatcaataaagcatactgagaaatgtgcttctttcagatattcaaggccaacaaggaagccaatgtggcaggagaatgagcaagatgagagggatgagagatggtgtcagaggatgctgagggaggagatggcctgacagctgctgaaactggaaggcacaaggaggccctctgtccagatgtcgatgcatttgccctgtatgaatttggttgcaaaggtatcccatgaagtgaaatgcatcccctcttcattttcttcatttgccttgagttctggagttctggtatctgtctttttttgttgttgttgttggagtcttactctgtcgcccaggctggagtgcagtggcgtgatctcggctcactgcaccctctgcctcctgggttcaagagattctcctgcctcagcctcctgagtagctgggattacaggcatgtgccaccatgcggggctttttttttttttttttttttttagtggaaacagggtttcaccatattggccaggctggtcttgaactcctgaccttgtgattccttcgcgtcagcctcccaaagtgctgtgattacaggcataagccactgtgcctggcccgctccttcttaaaataaaaaagaaatgccctcacttcagtgtatatacctccacaactaatgtcctatttctcttctcgacttaattgcaaagatccctgggcaaatgttctacttttactcttttaattaggcttcccccatttcctcttctaatgggacttccatttccgttactactaattgtcaactattatcctccattgctgagttcaacatccatttctttttagcatcacaaataaatacatcaatcaattaatgactcaagcaagcaaacaaccaaagcaatctctctgctctgggcttggctgtattggctctcaggggacttcaggtctatattcatggctctcattttcccggagcctttcctgtagtacctactgcgcacttggactcaccctgatggattttctggaaggaaggtgtcgtccatgtggatgtatgaattcctccctggatggttgatgatggaaactgaagctctgtcttgagacaagacagcaggagaaggtcaggcatcagtactcgagccagattgaggactccaaaagaaacaagcatgtcccatccagtccaaggtagcatatgctgagggacagtgacagcggagatatttacggatttgtgtatctgctcattaggcacatttccctcttgttattcccaccctcagcacacgatgtccctgtgggacattgctctgcactgaaagaatttttttttttcttgcatactctgttcccaagacattagggtaaacatcaggtcaatccagtcttttttttttttgagacagagttttgctctgtcacccaggctgcagtgcagtggcacgatcttggctcactgtaacctccacctcccgggttcaagcaattctcctgcctcagcctcccaagtagctgggactacaggtgtgcgccaccatgcctggctaatttttatatttttagtagagatggggtttcaccatgttggccaggctggtctcgaactcctgacctcatgtgatccacccgcctcggcctcccaaagtgctgggattacaggtgtgagccaccatacccagcccactccagcctttgttactttttctatatggacttgcttatcttccagagacctgtctgaaacctgaacccaacctggagtgaaagttttctccaaagtctaaactgaggcacttgtgaagaggtcctttggatctctaaagtttagttttctgcttcaatgatctgtctaatgctggcatggggtgtcgctttatgaacatacttgcatgttgccctttttgctttataaatgtagatgtttggctaagttaatctcatgttatacacacatttccaacctgattttatcagttcattcttctttattgtgacttttggctttttgtattagatctctttctggaagttgcatcacatcacctttggctatcatttaaaaatcattcttaggccgggtgtggtggctcatgcctgtaatcccaacactttgggagatgggtggatcacctgaggtcaggagtttgggaccagcctggccaacatggtgaaactctgtctttactaaaaatacaataattagctgggcatggtggcaggtgcctgtaatcccaggtgcctgtaatcctactcgggaggctgaggcaggggaatcgcttgaacccaggagacagaggttgcagtgagccaagatcacgccaatgcattccagcctgggcagcaagagtgaaacttcatctcggaaaaaaaaaaaaaaaaaaaggaaaagaaaaaaatcattcttctttatcatctgactacagctcatcttgatctctcatatagcagtatttgcaacactattatcgtgttgccgtttatgtctcttcctcggtctagaagcagtggctttgtgaagaatctggggcttcgatgttgggtaggtatatatttggatagttaaatctttttatgaattgaacattgaacgttttatcatcatgtaatgcctttcctcatcctcctttttttttttttttttttttgagacagagtctcgctctatcgcccaggctggagtgcagtggtgccatctcggctccctgcaagctccgcctcccgggttcacaccattctcctgcttcagcctgcctagtagctgggactacaggtgcccaccaccacgtccggctaattttttgtatttttggtagagacggggtttcaccatgttagccaagatggtctctatctcctgacctcgtgatccgcccgccttggcctgccaaagtgctgggattacaggcgtgagccaccgcgcctggcccttcgtcctcctttttgactattgttggtttaaattcttttttatctgatacaagaataatgacccctgctctcttttgttttccatttgtgtgataggtcttttcccatcattgattttgagcctatgggtgttattacatggatctcttgaagaaggtgggaagaggggccttgtttttatttttcaatttttaatttttttttgggtacgtagtaagtgtgtatattactacagggtacatgaaatattttgaaactgccatgcaatgcacaattatcacatcatggagaagggggtacccattccttcaagcattcattctttgtgttacaaacaatccaattatagcctttaaagtatttaaaaatgtacaactaaattactactgaccataggtcatcaccctgttgtgctatcaaatagtcttattcatttttttctattttttttgacccattaaccatctccacctttcccatatcactcacttaccttcccagcctctggtaaccatccctttttgtgtgtgtgtgtgtgttttgtttgttttttgtttttgtttttttgagatgtaatctcactctgttgcccaggctggaatgcagtggtgcaatcttgggtcactgcaatctctgcctcctgggttcaagcgattctcgtgcctcagcctccctagtagctggtattacaggtgcgcatcatcatgcctgggtaatttttgtatttttagtggagacagcatttcaccatgttggtcaggctggtctcctgacctcaagtgatccgcccgcctcagtctcccaaagtgctgggattacaggtgtgagctgctgtgcctggccagtaaccatccttctactctctatgaccatgagttcaattgttttgatttttagatgccacaaaaagtgaaaacttgtgatgtttatctttctgtgcctggattattttacttaacacaatgacctccagtttcatctgtgctgttgcaaatgacaggatctctttattttttatggctggatggtactccattgtttgtaagtaccacattttctttattcattcatttgttgatggacactgaggttgcttccaaatcttggctattgtgaatgttgctgcaacaaacatgaggatgcagatgtctctttgatattatgatttcctttcttttgggtatacacccagcagtgggattactggatcatatggtagctcttttttttagtattttgaggagcctccaaactgtcctccatagtagttgtactaatttacattcccacaaacaatgtacgagggttctcttttctccacatcctcaccagcatttgcttacctatccggccaggcatggtggctcccacctgtaattccaacactttgggaggctgagatgggcagatcacccaaggtcaggagttcgagaccagcctggctgacatggcgaaaccctgtctctactaaaaatacaaaaagtagctgggcatggtggcacacacctgtagtcccagctactcgggaggctgaggcaggagaatctcttgaacatggcagtggaggttgcaaccattttgtgctctgtatttaacaaaacaaaaacatctgttgaataaacagagagagatgaatgaaataggcatgagagggtaaaagatctgataggtacaagtggtcaatgagagatcgtgatgcagaaagcttcctcatttctagcagcaccccaagcctggttaaatacctgtgaagccaagaaaaattaataatgaacaaaacatggtctatttagagtgtcaagacaccttacagattgaataccccatgagaaaaatgagtgaagggaataagcccagaattcaccaaagaaaacataaaaaatgcaacaatagtgagttgttttttttaaccagatgcaatggtaacatagttttgtaaaaaataataaatgcaaaacttctgaaatcagaagaaaacaggtttggaatgtcagagctaccttgaatcagctgtctgaacttggagaatcaacaagaccattcaaaatgttaatatgtttttctaaatagtgagatagcagcatctatcctcctgagatgggagatgtaatcaatctgtgtaaggtgctttacattgttccttcctgttagtgaatgaatagttatcaccagtgatgaagtgaggctgatatttttccttctggctctcaaaagtctcccttttttctctatcacccggttacccaattcaatggtcctgttttagttcctcatgatttcttccaggcttctgaggctggcatctctatatacccatattctcattgatccagaaaaatctatatttcacagctgatcacctaacactctggcttaaatgcccaccctgtgattccccatgggagaaagaagctgaaattctacagcttcaaacacaaggcttgactctgataccttcacactgccctaccccaacccacatcaatcttccataagttgaccaagttgaccttgactttcagcttcaccagaagccagagcttcaatgctcaatgtcttcatacatttatctccttctgcttgaacttgttccataaaatagcagaagaagactaatattaaaaaaataagtctttgtgttctcacatatacctgggatataaaaaattaaaactcatagaagtatagagtagaatggacattaccagaggataggggtgaggacagggtcgatacaaaaaggaaaatgttagtcaaaggctataaagtttcagctggacaggaggaataatttctagtgctccattgcacaacatggtgactattgttgagaataatgtactatatatttcaaaattgctaaaatattaaattttaaatgttctttccacaaacaaatgatagatatgtgaggtgatggataggttaattagctccacttaatcattcaacagtgtatacatatatcataacatcacgttgtacctcataaatatatacagttactattggtccatcaaaaattaaatttaaaactaaattttaaaagatctcatcaaaaaagacaaaaaggtagctataaggaaaaagggttataaaataaggtggaaatacatatgatttacttctactaaagatgcagaagaattttctaagttaagaaaaattggagagtgtgggttcatgataggaccaactgagagatttgacaaagtttataaaacaaagtttataaactttcttttcttcatcctgtatatatatatatatatatatatttttttttttttttacacaatcccttgatgtacatctatacatacataaaaaattaactattattcagcaaacttggtgaaaaatctctaattcttcatttgaatgaatgcaatcaaaagaataaaaacactcacactctagaacataaaagcaaagaacctgcaaaatctgcaatagagaaagtaaatggctaacaaaccaacaaatgctgtatactcagcctcagcagaaaggaaataattgcaattaaaaactcttgagtaatcctaatttgacctatgaaataatattttttcaagtgattatgaaaaataatccagagatgtttctcaacatcctacaactaacgggacagcccacactacagaaagttaagcagtaaaaatgttaacactagagaggttgaaaggctattctgtccagaatatgtccaacttcaatgtgtgtatgattcaattagggatcttgttcaaatgtagattctcatatggggcctctaggataggtccagacattctacatgtgtaatggtttccccgttgatgttgatgctccctgacctgttgggtggttcactctttgaggatcaaggctatggtccagtgttagagtcaattagtacttcgagatcttctccagcaagaatcctaccacacacctcatatttgacttcaggtggtcagtgttggactgggcaggtcagcttttgcataaataaagattgcatgtgcctcttgtgtgcttctctcatgaaagaaaatgaaacctttagaaattccatctactggctgggcgctgtggctcacgtctgtaatctcagcactttggaaggctgaggtgggtggatcacaaggtcaggagtttaagaccagcctggccaatatggtgaaacccagtctctattaaaaatacaaaaattagctgggcgtggtggcacgtgcctgtagtcccagctacctgggaggctgaggcaggagaatcacttgagctcaggaggcagaggttgcagtgagccaagatcgtgccactgcactccagcctgggtgacacagtgagactctgtctcaaaaaaaaattccatctacttatggagtttatgtgagaagtaagcaatattttgaagctcattggagattaccttgcacagagcagatgctcaatggatatgtcagctcttcttgactatgtctttagttcatcaaattactccttcaattcttgtaggaagtcttataagaactcctttaattcttcatagaacacttactttattgcaagtttatagcacatcattcattaacatttaatgtggacataagtatgaaattcttgcaagtctgtttctcatgccagtaaatttaatttttacttatttattaactcccctattgtctttgggaatattgtgtttctccacctttggctcggggctttgctaatacctcaattgggaggcatgtatatccctacagtggttgatgtggagcatagatatgtgatgtgctttgtctgaaagaatgtgcgcattcatgagaagtccaatgtctatgaagaagttgtaagaggccttgtgagtttccaccacttctcttgatcttcctctgtcaaactgtccttcctattcaaaattcaaaaactaactagatttggatagtcgcatggatggaatattttgtcctcttcaaaatccctatgtcctaatcccaatgaaaaactttcccaacataaactcctatgtgataaaaaagcaggacattaaaccgttgactaatgggatggcttattatgcagcagtagcttactgatacaataaacagtgcaaacagatctaaagacattcaaaatattctaatgcttcttagtttttaacattggttcttatatttgaggcagcattaatgattacctggatattgatgcttatgtcagataattgtattaaaacgagagtattgtttcctttttttctaggcagccaggaaagcttgcaaggacatatatgtttttgaaggaatgaattgtgaccttggttcacacaagtttctattcccagaggcaataataggcagaaatccaagttcatgtgtgtgtattcctttgatcgtgagagttgaagagagttcagagtataaaatatataaagcaactgctgataaatgaagcacacatattgttcacttatctgcactttaatgtttatgacacaatttttaaaggggaagatatttgttagtacaatggaaggagtcgtatttataggtagcactggaaaattttaagtaaaatgaggaagctaatacaataaaattatatggactatgacaccaaatctctcagatgcacaaacttcattacacatggacactaagcttgtatgcttcaaatgttccacagtaattccatatgtgactgaaagttttattctgtcatattgaaggtaattgctgagtcttaaggccagatgaagtcaatttatgtatgctcacttgtctttctgtttagtttacacttggaacatgtattttataagcaatttttaatcccagcactttgggaggccgaggtgggtgggtcacgaggtcaggagatcgagaccatcctggctaacacagtgaaacctcgtctgtactaaaaatacaaaaaattagccgggcgtagtggcgggcgcctgtagtcccagctactcgggaggctgaggcaggagaatgacgtgaacccgggaggtggagcttgcagtgagccaagatcacgccactgcactccagcctgggagacagagcgagactctgtctcaaaaatcaatcaaccaatcaataaaataaaaaaataaaaaataagcaatttttgtcctccttctttttaccagggaatatagagggcactgtagacaccaagcagaatagaagacaggatcctaaggaagagaataaaattccaggagtagctataaaacacactagtatattaaaatttacattgtgaggaggaccagttaaggcagtgacagagaaagaaataacaaatggaaaaatgaaaacctgtggtctcagctaggcatccacagtaaaattatattaatgaccttagagtggccattcttaattatttgggctaacacaactcattactgcatgagacggataggaatctccaccttgtttctgaccctagtctgggaataactttgcaaaagttggaaaatgacaaaggacaaaaaaactgttggctgtttgagagctgaaagcttttaaagaaaaggcatacattttacaaagcagttaagatcatacaaatcccaaaaaattaacagaaggaaccacttctgttttcacaatctgactaataaatcacaatgtttgggtctggggcttacagctctggaatcacagacccttcttgaaaaatggctcttttaaaaaaatttttttttttttaaattttgagacagagtctcactctgtctcccaggctggagtgcagtggcatgatctcagctcactgcaaccttgcctcatgggttcaagcgattctcctgcctcaacctcctgagtggctgggactacaggcgcatgccactacgcccagctaatttttgtatttttagtagagatgggggtttcaccatgttggccaggctggtcttgaactcctgacctcatgatctgcccacctctgcctcccaaagtgctgggattacaggcttgagccactgtgcccagccgaaaaatggctcttttattgtttccctctgaagaattgtgtcagagccccctttatgtctttattcctcagactgtaaatgaaggggttgagcatgggggtgaccacagtgtacatcaccgaggcgacagcagttgagtgtaagttttgggtcatagtagagctaaggtacacccctagccccgtaccataaaatatggagacaactgagaggtgagatgcacaggtggaaagtgccttgtacttcccctgagttgacgagattgcacgtatggaggaaactatcctacagtaagaataaaggatcccaacgagaggaccaccgtccagcagcacagctgcaaaatgcatcaccatgttgttcacaaaggtgtcagaacaggcaaggtggatcatctcattaagttcacagaaaaagtgagggatttccaagtctgtgcagaaggacaactgcaatgtcactaagctttgtaacatggagtttaggacactcatgatccaggacaccagaaccagcagtccacagagctgagggctcatgatgaccgtgtagtgcagggggtgacagatggccacaaactggtcataggccatcacggtcaggagtaagctgtccaacactataaagagtacaaaaaagcacatctgggtgatgcaacctgcataggtaatgactttgctctgtgtctggatgttcaccaacatctttgggaccatggtggaggcaaaacagatatctacgaaggacaggttggagagaaagaagtacatgggggtgtggaggcaggagtctgagattgcggccaggatgatgagcaggttcccgagcacagtgaccaggtacatggacaggaacagcccaaagaggaagggctgcaattcttgtttctctgaaaatcctagaagaagaaattctgaaatttgtgtctcattccctgctttcacctggttgatgtttctaccaaaaacaaacaaacaaacaaaaaaacacacaagaaagaacagaacatgagaaaaacatgcattacaaacttaccagaaatgctgtcatacatattctacagtgaagaagctacgttttattttattttttatttttatttttttgagttagagttttaatctttatgcccaggctggggtgcaatggcgtgatgctggctcactgcaacctccgcctcccaggttcaagcgattctcctatctcagcctcccaagtagctaggattacaggcgcacgccaccatgcctggctaatttttgtatttttagtcaagactgggtttcaccatgttggccaggaaggtctcaaactcctgaccttaggtgattcacccgcctcggcatcccaaactgctgggattacaagcatgggaagaagtagtatctaaggttatggtttcatattatataatgatataaggattccaatatttatgagaaaggtggtctttagtcagatgataaataatgatcaccaaatgatggtcaaaggtaatgcaacttctaagaagagatctaatacaaaaagccaaaaagcacaataaaaaataagagagaaaacaagttggaaatgcatgcataaaaggcaatttatttgtccaaatgttgcagaagaactttctacatttatgtagcaaggaggggagcacactatgatcaatggatttggctacacaatacttctaagctttcacacatttccctcaaatacattgaaagttacataacagtaataaaagacatatgccaaaattgatgaagaactccaagtcttatattttgataaatgaaataaaacaggattaaaaatattacaaacccattttacaaaaggaaagttcatgtacagtttgcaatagctgtaaatgtctaacaaatacacagatatatttagcttcactagtaaaaaaaagtggcaaagtttgttagtatttcactttttcacccattaaataagtttttgatttcatttgaatacttagcatgagagaagatactacaaaatgtatacctcatgactgctgttgtcaggtagtttttgaaaggaattcattggtctggatctttctcaccaatatggaaagacagtcaaatatgccccttcttaaaaacaaacaaacgaacagacaaacaaatccctctcttcagtgtatatctctccacaggtaattgacagagcaggagcaccatcatcttggacaaccgccactttaagttccagctccttttctaacctcatgcatcttaagaaaatcacttctcttctaacaacaagcagccagaaagagcagacagtaaaacacagataagacagctcgggcatagagggagggggaaagtctcttgggtaaccaccaaacctggcactcacacagtgggccccagaaaaacagtgggctctaataagcacattcctttccctttaggtgcactaagatagggaagctaaaagcagacttggggggtatgcctgcagctgcaagaagatgtacgggaacagacacaaaaactctctctccaggtaagcaagacaaagaggcacagaaacattccaagccggtgataagctctcccgccttgaacccttaaaaactcttagtctgtaagagagtgccttggctggcacagtggcttacatctgtaatcccagcactttgggaggctgaggcaagcagatcatgaggtcaggagtttgagaccagcctggtcaacatagtgaaaccctgtctctactaaaaatacaaaaaattagctgggcgtggtggcaggcacctgtagtcccagctacttgggaggtggaggcaggagaatcacttgaacttgggaggcagaggttgcagtgagctgagattgcaccactgcacttcagcccgggcaacagtgtgagactccgtctcaaaaaaaaaaaaaaaaaaaaagaaagagagtacctctgacctaactcagccagaagcccctctcaggtttgttctccaaaataaacctgtcttcaaccgttgagctgcttttcatgtttctttaactattacagtagtaccctatttttcatcttcacttaattgtaaagatccttgggcacggatgctacttttactggagccactttaatcatctcatttcctcttctaattgggcttctattactattacttcattgtcaacaatcatcctccaatgctgaattcaatgttcatgtctctttttagtatcctaagtaaatacctgaatcaattaattagtcaggcaagttagcaaacaaccacaacaatctctccactctagcactggttggtttggctctcaggtagccttaggttcacgttcacagctcccattctccctgaccctttcccgcagtacctactggactctttgacttaccttgactggttttctgaaagaaaagcctccatgtggaagtgtgaattcctccctgaatggttgttggtggagatggaagctctgtcccgagacaagacagtaggagaaaggaaagcatcggtgcccaagccagcagatttagactccaaaaaacacaagcatgtcccatccagcccaaggttgcatatgctaagtgacaacagccaagggggtacttacagatttgcacattaggtgcatttcctcttgttattccaaccctgagcagatcattttcctttgggattttaccctgctctgaattgattttttccctgtattctctattcccaagacaccatattaagcctgcagtgaatccagtctttattattccttctccatggacttgtttgccttccagagttctaacctcctaatgccttactctattcctcattcccgagggaaggttttctcctaagtctaaactaaggaacttgtcttaactatgttccttgcatctccaaggtattcacttgtgatgggaacacagcccttgatatctccagaattatcgctattttcctctttaacaagggggtgaactctgttctgatataaaaccgtgagtcctacatttcttgaaatcatgatgcttttgccaaaacaatgagaaattttgtacttcttaaaaaggttaagagctgtcatttaattcttcatgtataaaacatctggttactcttaagagatatatttggctcttttcatgcaagttgccctgagaatagcaccttctaaagattatttaatttaatttttcaaaatttatttatttaaattgacagataaaattgtatttatcacaaaaaacatcacattttgaggtatatatacattacagaatggttaggtctagctaatggatatatgttttacctcacatagttatcatttttgtagtgaaaacacttaacatccactctcttaacattttccagaaacaccatatatcatccttaaatataaaatcttcatgctatactatagatctgctgaacgtattttttctggctgcaattttgtatcctttgacaaacatttccccactcctcctcccacaacagctgtagcctctggtagccactgttctactctataattctatgagatcaacttttttatattccatatgattaagatcatgtgatatttgtgtttctgtgcctagaatatttcacttaacataatgctctctaggttctttcattttgttgcaaatcacagtatttccttcttacacagggctgtatagtattccattatgtacatatgccacattttaatatccattcatccactaaggtacacttagattgacttcatatcttggctattgtgacactgcaataaacaggaaagtgcagatatctgtttaatacactattgtcatttccattggataaatacctagtgggatccctgagtcgcattctatttttaactttttgaggaacgtacatactgttttccataatggctatactaatttacattccatgaacaatgtataagatttcccctttctccatatcgttgtcagcatttgttatttttcctgtcttttgataatagccctgttagctgggatgacgtggtatctcattgtggattcaatttgcatttccctgataattcgtgactttgagcacttttcatggaccattgtatacttgtatgtcttcttttgaaaaaagtgtcctcaggtcgttgcctatttattaatcagattattttttcccactattgagttttaaaatacattctagataaccatttttcagatgtttagtttggaaatattgtctctcattgtacagcttttctcttggatctgtcaattatctcctttgctgtgcagaagattttttagtttgatgtcatcccattcatctatttttacttttgtaatctatgcttttgaagttttattttgaaaaatctttaccttggctaattttatgaagcttatcccatgtattttcttctagtagtttcatagtttttggtattccatttaaatatttatttcatttaaagttaatttttgtatatagcaagaaaaggaatctagtttcctttttctgaatgtggatatccagttttcccagtagcattcattaaaaagactgtcctttcaccaatatgtgttcttggcacttttgtctaaaatcagttggctgtaaatatgtgtttatttatgggttttcgtctctgttcctttggcccatgtgtatgtttttatgccagcacgaagctggtttaggtacaatagcttcataatatagtttgaagtcagatagtgtgatgtctccagctttgttcttttggttcaacattgttttagccatgtagggtcttggatggttccatatgtattatacaattttttttgtatttctgtgaagaatgtcattggtattttgacagggattgcactgtgtcttttgatcactttgggtattatgggcattttgataatattgttatttagttatttatttactttttgagacaaagtctcactctgttgccagactgaaggccagtggcacgatccccactcactgcaacctccacctcccaggttcaagtgattcttgtgcctcagcctcctgagtagctgggacacaggcatccgccaccttgcctggatagtttttgtatttttagtagagatggggttttgccacgtttgccaggctggtctcaaactcctgacctcaggtgatctgcctgccttgccctccccaaatcctgggattataggcatgagccaccgcacctggccaattttgacaatattaatcaggaatacatgttctaccttcagtccttggcagagagcatgtattctaaagttttaatgagaaaatctttcatgcatttgaggaatataaagtggattttggcatattccaggcactgtccagaaaatgaatgtgtgatgttataaaacaaaagaagaaagaggtaagaaggagaatgtggatggagtgttattttttattgggtggtcaggtaagaccagtagacaaggtgacaactgaacagagaccacaatgaagacagggtggagtcaccatgttccttgcagaagcgtatgcaaggcagaaggaacgacaatgaaagaccctgaggcgtgttcttctttcagatgttcaagtccaacaagtaagccagtgtggcaggcaaacaagcaagaggagaggaatgagagatggtttcagaggatattgaggaaggagttggcctggaagctgctgaaacctgaagacacaaggagtccttctgtccagatgttgcatttgcactttattaatttggttgcaaaggcgccccatgaattgcaatgaacttcctctttgtttcctgctgtggccttgagttctgatgttcatatgatgagttatcttttggaatacatagcccaggttctctttgtctgaaacttctcaccctaaagaaacacacacacacacatacacacggaacacatatacacatctgacgttcatattttgtgttgtcatttggaatatgtaactcaggatctctttgtctgaaacttcttctcactctgaagcatcatacacacacacacacacataaacacacacacacacatagacacatacacacatatatacggaacacacatacacatctgctgtggcttcctgggtgcatgttactcccatgcccttctcaacaccaattacagcattagaaaggaaatggataccaggtaagatttgaataatgaaaatctaaaacaaacttatgaaagaaaagatatgaaataaattactgacgtgagtcagaaattcaaaattaaagtggcaaacatctgcaaataaatgctcaaccattgtggaagacagtgtggcaattcctcagagatctaaagacagaaatatccttcaacccagcaatcccattcctgggtatatacccataggaatataaatcattctattataaagacacatgcacacgtatagtcattgcaacactattcaaaatagcaaagacatggagtcaacctagatgcccatgaatgatagactggataaagaaaatgtggtacatatataccatggaatactatgcagccataaaaaagaacaagatcatgtcctttgcagcaacatggttggagttagaggccattatccttagcaaactaacacaggaacagaaaatcaaataccagatgttctcacttacaagtgggagctaaatcatgagaacacacggacacagagaagggaaaaacacactggggccaactggagggtggagggtgggaggagggagatcaggaaagataactaatgggtactaggcttaatacctgggtgatgaaataatctgtacaataaacccccatgacacgtgtttacctatgtaacaaaactgcacatgtacccctgaacttaaaagtaaaaaaattaaaatacgctttttttagcagtagaagaaacagtatttaaagccataatttcattcctatctaagtataaatggatccaaatatgcttacgaaaaagatcttaagttgaatgtaattttagtttgtattcaattgtaggttgtgagtgcaaaagagtatcttccacaagatggcagtagattactgctttaaaatatagatctgcatattctcatttatatgcagaatctaaataatcaaactcatagggatagagaggagtaaggcagtggttaccagggactggagtatggggtggggtggatgcagaaagcggagacattagataaaggatataaagttagcaagaatgggttctagtaatctattgcacagcatgatgactttagttgagaataatgtattatatatttccaaagtgctagtatcatagattttaaatgttctcaaccacaaagacatgataagtgtatgaagtgaccgatacattaattaggttcctttaatcattctacaatgaatacatataaaataacatcttatcctgtgttagtttgctgagaatgatggtttccagcttcatccatgtccctgcaaaggacatgaactcatccttttttatggctgcatagtattctatggtgtataggtgccacatttactttatccagtctaccattgacgggcatttgggttggttccaagtctttgctatcgtgaacagtgctgcaataaacatacgtgtgcatgtgtctttatagtagaatgatttataatcctttgggtatatacccagtaatgggattgctagaaaaccaaacactgcatgttctcactcacaagtgggagttgaacaatgagaacacacggacacaaggaggggaacatcacacaccggggcctgtcggtgggtggagggctagcggagggatagcctaatgcagatgatgacggcttgatgggtgcagcaaaccaccatggcacgtgtatacctatgtaacaaacctacgtgttctgcacatgtatcccagaacttgaagtataataaaaaataaaaatagaaataaaaataaaataacatcttactgcaccccacaagaatgcaatgatttttgtcaatcaaaacagaaattaaaacattaaattaaaaataaaaatagatctaattacaaaaggaagcaataagcaaaaacagatgtgaaataagatggaaatacttatgaaggatgatatatttctagcaatgatgcagaagaattttctaagtcaaaaaacaattggagaggtgggaacaaattatgacaaacagatttgagcacacaacgcttataaactttcacacattttcctgatatacacctctacatacataaaaattaaacattattcagcaaagttggtgaaaaagctacaatttcttgtttgaaagaatgcagtcaaaagaatgaaaacattcagacgtcagaacatgaaagcagggaacttgcataatttgcaatagagaaaataaaaagcaaacaaatccagcctcaccagaagaagaaaataattgcaagcaaaaactctttagtattctcattttgacctattgtataacatttatttttcatgtgaatatccaacatgaaagaagagactatgaaatgtatgtcttgtgaactgctgttgcaagatggaatttacaagtaatccattggtgtggatctttgcagttaagcacagaaacatgctcaaatacgcctctcttaaaatttgttccaaagtctctcaattcattgcacatcattccacaccaaatattctactatcctgcttctttcactgcaaaatttctagtatgtgttgtaatttactggaaccactttttgtcttccattccttcttcaatctcatccaaatcaacttcctttattatcacttagttgtcagcaatgatccctgcattgcttagtatgacaaacacttctctttttaacatattaactatattaaatataaattagtcaaccaggcaaacaaacacacatcaatctctcagcttgacttaggctagtttggctttcaggtaacactaggtaaatattcttgacttatattgcctctgaacattttctgcagtacctactgggcggactcacctgtatggggtctcagagaggaaggtctccatatggaagtctgagctcctccctggatgctgataatggagaatgaagctctgtccccagacaagacagtaagaagaagtgaaacatcagcaccttagccagacatatgtctacaaaccattcacatcacatccagtccgaagctgttacagtcttaaggacaatagcagatgaaatagatttttacaattccctgtatctatgcatcagacaaatttcccttttttcactccaatccatgagcacctaatcttttttcatctgttgacttttaaaaaagttatttaaatagttttttggggaacaggtattgtttggttacatgaataagttctttagtgatttcttttttttttttgagacagagtctcgctctgtcgcccaggctggagtgcagtggcgcgatctcagctctctgcaagctccacctcccgggttcacgccattcttccgcctcagcctccttagtagccgggactacaggcgcccaccaccacgctcggctaattttttgtatttttagtagagacggggtttcaccctgttagccaggatggtctcgatctcctgacctcgtgatctgcccgcctcggcctccaaaagtgcagggattacaggcatgagccaccgcgcccggcctttagtggtgatttctgagattttggtgcactcatcacctgagcagtgtacgctgtaccccatggatagtcttttattccccatccccctcccaccctttccccaagtccccaaaatccattgtatcattcttatgcctctgcatcctcgtagcttagctcccactcatgagtgagaacctatgatgtttggttttccattcctgagttacttcacttaaaataatggtcttcaatttccatccagattgctacgaatgccatcaattcatccttttcatggctgagtagtgtcccacggtgtgtgtgtgtatataacaatttctttagccactcattgtttggtgggcatttaggttggttccatatttttgcaattatgagttgcatgagcacctgatttttcgttggacacaggtctggaaaagaagaaacatttttctgctgattctgttccaaagagatcaggctagaagtcaggtgaatccagacttcattacttctctgtgaaatctcccacctgacgatggtctagcctccttagcacttttgctgaaacttgagttaaaattgtctccaaagattaagacgaagaatatgtcttcaccagggcccttggaaactcaacgtattgacttctggtaagaacatagttttattgacatctccagaaaattgcaattccctctccaacaatggagataatgtgttcatttgctataaaaccattgatagttagtataatccttggcttcctgatgctatcgacaaaacaattaggagtttcatgcttgtatacacaagaaagtgttgtcatttaatccttaatttatgaaacatttggctattgcaagagatataattacacattttatgcaccatggactgaagttggaatcttacatggtttgtctcatttaatgtcacatgtaatgtgtctcatttttgcacattcccatgctacgaggagcctctttctacatttgtagaattggggctaagaagggttaagtgatctgcccagtgttatgaactgagggaaggatgagctttgattggaactccatcaagatgtttctagttcttggctgcaggcggtggctcatcccagcactttgggaggccgaggtgggtggatcacgaggtcaggagctcgagaccagcctggccaatatggtgaaaccccatctctaataaaaatacaaaaaattagttgggcgtggtggcaggtgcctgtagtcccagctactcgggaggctgaggcaggagaatcgcttgaacccaggaggcagaggttgcagtgagccaagatcacaccactgcactccagcctgggtgacagagcgagacttggtctcaaaacaaaacaaaacaaaacaatacaatacaaaacaaaacaaaaaaaacggtttccagttctcacagtctcggtcagtggttctcaaccagggatgattgtccttccatgagacacttggaaatgtctggatacattttttgttgttgtcacctagggaggtgctactggaacctagtggattaaagccagggattgctgttcaacatctcacaatgcacagaacagtctacaccagaagtatccataaacatgttaaccttggagaggttgagagaatgttttggaaaagaatatactcaaattgaaagtttttataattcatttgggaccttgttcaaatgcagattctgatttgggacattgagggtaggcagaaacgttgtgcatttgtggctgtttccctgttgatggtgatgctgttcattctgttctgtgaagcactctttgaggatccagtgttagagtcaaagaaaactacttttaaacctttttcaccaagaatcgtaccacatacctcatgtctgcctttaggaggtcaaatgtttccctcagtggctcagcttctgcagaaacaagtttatacaagcctcttgagtacttccctcacagtaggataaaaaacttttagaaattccacccaccttgtagaatttatgtgagaagtaagtaacagttttttaaaattttactttaagttctgggatacatgtgcagaacatgcagatttgttacacataggtatacatgtgccatggtggtttgcagcacctatcaacccgtcatctaggttttaagccccgcatgcattaagtatttgtcctaatgctccccctcccctttcctccccaaccctgccaacagtccccagtgtatgatgttcccctccctgtgtccatgtgttcttactgttcaactcctacctatgagtgagaacatgtggtgtctggttttctgttcctgtgttagtttgctgaggatgatggtttccagtttcaggacataggcatggtccaagacttcatgactgaaacaacaaaagcaatggtaacaaaagccaaaatggacaaataggatctaattaaactaaagagcttctgcacagcaaaagaaactatcatcagattgaacaggcaacctacagaacaggagaacatttttgcaatctatccacctgacaaaggtctaatatccagagtctacaaggaacttaaacaaatttgcaagaaaaaaacaaataactccatcaaaaagtgggggaaggatatgaacagcaataacagtttaaagctcactggaaattccttggcacagaggagctgttcaatggagagcagctatagtgactaggttccaactccccatttcctaggctcatggtgacaccagaatggtgtttggggacaggaagtgagtctagcattgccctgctcctgggaggcagcaagttgtgatcatgaaggaggacttctacctaaggccctgtatagggagaagagaacttgagaggccatcattctatactttgttgaattcagggacatcatctgtgttactcttatgttccctccaaatagtcatattaaggaatttttagactctttcaagctgttctactatcttcttctcttaggaatatctataaagctgatgtttcttggtggatcatattaatcctctagctcttctgggaactcctccaagtcttcatagaaatcttatcttacttgttgaaagtctatagaatgtaattcataaacacttaatgttaacagaagtgcacaatatttgcatgtctgtttcacccccagatagataatttttattttttacttatttattgagtcctctattgtctttatgacaattgtcattctccatccttggctctgggtcttgatgatacctcatttgggaagaatctatgtccctgaaatggttgacattgagcttgaacataagactgctttttctatcaggatttgagcagtcatgagatgttcagtattaagaagaaataagagttattgtgagatcccaccacttctactgatcttcctctccattcaccatgtccaaaattgaaaaaacgaactagatttggatggtcctgtggactcaatgtttttgtctcctccagtattcatatgtattaatccttattataaaatcttctttagtatagctccctatgtggaaataaaagcatgtcattaaacctttttctattagtataccttgttatgcagcagtagcttaatgatacaatcaatgcaagcagaacaaaagaattcagaataatttaatgcctcttatttttggacatttgttctgatatttaaaggcagcattcatgtttatttcagataactgtataaaaaatgagactacctattagattcccttctagggagctagaatattttgaaagaacgtgtatgtatttgtagatataaattgtgattctgattcacaagtctctattctccaagccaatgctggttagaaattcaggttcctttgtgagtcatcatttgattataagggttgaagagagttagagtataaaagagacaaatgaactgatgataagttaaatacacacattgttcacttacctacattttaatggctaagacacaatattttaaaaggaagattttaagcaggacaacagaaggagtcttatttgtgtgtagcactgtaaatttttaagcagaaacagtaaaatgatataatgaaattacatagactgtgattccaaatccttcccttggactaacaaacctcattacaaatgggcaccaagcctctataagtagatgtatatcatcagatcaaatctcccaatgcaattcaatgtatgactgatttttttttttgagatggagtctctgtcacccaggctggagtgcagtggtgtgatctcagctcactgcaacctccacctcccaggttcaagtgattctcctgcctcagcctcctgagtagctgggattacaggcatgtgccaccatgcccggctaatttttgcatttttagtagagacagggtttcaccatgttggccagcctggtcttgaactcctgacttcaggtaatccacttgcctcagcctcccaaagttctgggattacaggcgtgagccaccatgccgggccaaaaattttactccatctttttttcttttatatttttgtgggtacatagtagatgtatatacttatggggtacatgagatgttttgatacaggcatgcgttatataataatcacatcatggtgaatggggtacccaccccattaagcatttattctttcagttatgaataaattttttaatccatattctttcaggtgtttttgtaatctaagtccagatgaaatcaattgattcacacaaatttatttttctgtgcagactacacttgaagtgtgaatttgataggcaatttttttttttttgagatggagtttcgctcttgttgcccagactggagggcaatgctgtgatctcggctcactgcaacctccgtctcccgggttcaaaccattctcctgcctcagtctcctgcgtagctgggattacaggcatgcgccaccacgcccagctaattttgtatttttggtagagacggggtttctccctgttggtcagcctggtctccaactccctacctcaggtgatccgcccgccttggcctcccaaagtgctgggattacaggcctgagccaccgtgcctgcacttgataggaaatttttaccttcttactctttccagggaattgagcaggcacggtggacactgaactgaatagaggacaggaccctaatgagtaggataaaatgccatgatgacagcactttggggggccgaggcaggcggatcccctgagggtaggagttcgagaccagcctggccaacatggtgaaaccccttccctactaaaaatacaaaaattagccgggcatggtggtacatgcctgtaatcccagctccttgggaggctgaggcaggagaattgcttgaacccaggaggcagaggttgcagtgagctgagatgatgccactgcacttcagcctgggtgacagagcgagactccatctaaaaaaataaatgccatgatgagctaaaatgcacactcgtgtggggtaaagtttacatgaccaggaagaacacttaaggtggtggtggagaaaggaataagctcaaagtgaaaaactgtcttctcagatatttatctaaaataaaattatattaatgaccttatggctgccaggtgcaattgattctgcaggactaatgcaacccacaagtgtaggagaaaaataggaatctccaccttgtttctgaccctagtttgggaaaaacattgggaaagtaggaaaatgacaaaaaaaaaaaaaaaaaaaagattggatatcagagagcggaaagctttataaaggaatacattaaattctatgtcagttgagatcaaagaaattgaaactctgagaaaaaatagaaggagcaaattccactttcacaacctgattcgtgaatcacaatttctgagtatgagacttaaagctctgaaatcacagttatttcttgaaaaatggcccttttattgctttcctctgaaggacattttcagagccctctttatgtctttattcctcagactgtagataaaggggttcagcatgggggtggccacagtgtacatcactgaggctgttgcacttgtgtgtgagttgtgggttgcagcagaagtaaggtacacacctaggcccgtacaacaaaataaagagacaactgagaggtgtgatgcacaggtggaaaatgccttgtacttcccctgagctgatgagattgcacgtatggaggaaactatcttagagtaagagcaaaggatccccacaaggggaccaccagccagcagccctgctgcaaaatacatccccatgtcattaagaaaggtgtcagaacaggcaaggtggatgacctgattaagttcacagaaaaagtgggggatttccaagtctgtgcagaaggacagccacaataccattaagctttgtgacaaggaattcagggcagcaatcatccaggatgccagaaccaggagtccacagagccgagggttcatgatgactgtgtagtgcagaggatgacagatggccacaaaccgatcataggccatcacagccaggagtaagctgtctaaccctccaaaaagtacaaaaaagcacatctgggtgatgcagcctgcataggtgatgactctgctctgtgtctggatgttaatgagcatctttgggattgtagtggagatgaaacagatgtctgcaaaggacaggttggagaggaagaagtacatgggggtgtggaggtgggagtctgagattgtggccaggatgatgagcagattcccgagcacagtgaccaggtacatggacagaaacagcccaaagaggaagggctgcaattctggttcctcagaaagtcccagaagaacaaattctgaaatccctgtgtcattctctggttccatctttttttttctatttatttatttatttatttatttatttatttatttattaacatagacagggtctctcactctgttgccaacgctggtctgaacctcctggactcatgcgatcctcccacttcagcctacaaaagtgctgagattataggcataagccattgtgcccaggcttggttgcatcttttcaatgtgactaccaaaaagagagagaatatgacaatgtaattatgcattacaaacctatcagaaattctctcatttatactccggagtcaagaacttatttttcctttaaaaattatttatttctatggtgacagataaaatggtatgcatttatcatgtataacatcacatgtggaagtatatttacattgtggattggctaaatctagccaattaacattagtattacctcatatagtcatcattcttgtggcgagaacacttaacatccattttcttggcattttccaataattcaatatatcatcatgaactatattcaccatgctgtaaaataaatattttgaagttattccttctatctaattatcatcttgtatcccttgactgacatcacctcaagcctccataccaattgccctggcctctagtaatctccattctacaagaagctgttttctatgttttgtgtgtaaatctggtccctgttagaagatctccttgccatctctgattaggaattcctagaccacgctctctcgctctctctctctctctctctcagcctttccctgagggcatgtattctacagtatcattaaagagaaaaatcattcatgcatttgtggaataaaaaatgagttgatgttcagggtactgtatagataatgagtcaatggtgctataaaacagagtccctacaatcaaataacgggaacaaatacatatatactatgtcagttggtgattagtcctatgaataaaaaggataaaaagtgttacttttaataggtgtacagacaagatcagcagacaagctaaaaactgaacagagagcagaatgaagacagggcgagagtcatcatgtcccttgctggagtctgtgcaaggggaaggaaggctcagtggaagacttcacagaatgtgcttctttcagatgttcaaggtgctcaaggaagccagtgtgtcaggggaatgtacaggaagagagtgatgagagatggtttcagaagatgttgtgggatgaggtggccttgaagctgctgaaacttaaagacacaaggagtccgtctgaccagatgctgttgcatttgcattttattaatttgcctgcgaaggcatctcagtatgtgtaatgcatcccctctttttttcccgccgtgtctttgacttctggcttttctattatgagataccttttggaatacagagcccaaatcccctttctctgcaacctgcttttatgctaaaggtgcgtgcgcgcacgcacacacacacacattgcctacatgcacgcagcacactgtagctccctggagccatgttactcttgtgcttttctcaccctggttacactgttagaaagaaacgaataccaggcaagttgtcaatttcaaattatctttccccacgagaattcagaaatggtctgatagcatgtgagacagccttctcatttctcttctttaattattcatgtggcatctcttctttaattattcagggtctttgggatttgaactctttttgacagtcctatggaattgcactagttctggttctggtcttcctgtaacatgcaatgtccttcctagaccatactattgaatcctggctgggcaccgtggctcacgcctctaattccagcactttgggaggctgaggtgggtagatcaattgtggtcaggagttcgagaccagcctggcctatgtggcgaagccccgtctgtactaaaaatacaaaaattagccaggtgtggaggcaggtggctgtaatcccagctactcggggggctgaggtaggagaatcgcttgaacctgggaggcggaggttgcagtgagctgagattgtgccattgcactccagcctgggcaacaagagcgaaactctgtctcaaaaaaagaaaaaaaaaaagaaaaaaatcctgcacacactatgataactgtctccttttctgcagaatgaaattctccatatgatttcatccttgaggacattgtgtcatagacacatttgttacattttactttgtcttctctgttataatgcatgagtcaaatgagcaggaacttccctgctttaagtttgtattttcacaaaggtgtatgagtatgtctgtattatgtagaaaaaaattaaagcaatgagacgtgataaaataaaaagaatgttatgggattaaagccagggtaaatgtagtgatttccaaacaactatattttttaaatgttatggtacataaaacgttaaccaagccaagataaacaataagaataatttaatgatatcaaatgatttagtttattggcaaagacctagacataaaattatataatacacaatgtttctaaaatgttctggcacatagaagatactctcgacttattgaataagtcaggaagtaagtcctagtatatatgggtattaaaatatgacaagattgcaatccaatttagttgcaaaagaccagattgttgaataaaagcagaaataaatagctatctacctgggagaaaatgaagtgtgtctcccgactcacattttacaaagaattagcagatttaaagacctcagtgtaaaagtcagcaatatatgttagacgaatacatagataactacatataagatcttagtgtagacaaagtattttaactaacgcaagaaaaaaaactaagaaagtagacatatttttaggtaaataaaagttaaaactttttatgaccaaaaatgtttccttaaatatttcattaacagtcaatgaggagggcaatataattggatcacagctgtaatcccagtgctttgggaggctgagtagggaggtcacctgaagccaggattttgagaacagccggggcatcatagtgagaaccaggctctaaaaagtaaaccaaaaaagttaacgatcccaaagaaatacaaactcccatcagagaatactataaacacctctatgcaaataagctagaaaatctagaagaaatggataaattcctggacacatacaccctctcaagactaaaccaggaagaagtcaaatccctaaatagaccaataacaagttctgaaattgaggcagtaattaatagcctaccaaccaaaaagaggcccaggaccagtcagtttcacagctgaattctgccggaggtacagagaggacctggtatcactccttctgaaacgatttcaaacaatggaaaaagagggactcctccccagctcaatttatgaggccagcatcatcctgataccaaaacctggcagagacacaacaaaaaaagagaaaatttcaggccaatatccctgatgaacatcaatgtgaaaatcctcagtaaaatactggcaaactgaatccagcagcacatcaaaaagcttatccagcatcatcaagtcggcttcatccctgggatgccaggctggttcaacatatgcaaatcaataaatgtaatccatcacataaatagaaccaatgacaaaaactacatgattatctcaatagatgcagaaaagtcctccgataaaattcaactccccttcatgctaaaaactctcagtaaactaggtattgatggaacataactcaaaataatcagagctatttatgacatacccacagccaatatcatactgaataggcaaaagctggaagcattccctttgaaaactggcacaagacaagtgtgccctctctcaccactcctattcaacatagtgttggaagttctggccagggcaatcaggcaagagaaggaagtaaagggtattcaaatacaaagagaggaagtcaaattgtctctgtttgcagatgacatgattgtatatttaggaaaccccatcgtctcagcccaaaatctccttaagctgataagcaacttcagcaaaatctcaggatacaaaatcaatgtgcaaaaatcacaagcattcctatacagcaataatagacagagagccaaatcatgagtgaactcccattcacaattgctacaaagagaataaaatacctaggaatataacctacaagggatgtgaaggacttcttcaaggagaactacaaaccacagctcaaggaaataagagaggacacaaacaaatggaaaaacattccatgctcatggaaaggaagaatcaatatcttgaaaatggccatactgcccaaagtaatttatagattcaatgctatccccatcaagctaacattgactttctttacagagttacaaaaactactttaaatttcatatagaaccaaaaaatagcccgtatagccaagacatttctaagcaaaaggaacaaagctggaggaaatgattggctctcaggtgacctcaggttaatattcacggctcttgttcttcctgacctttcctacagtacccactgggctctgggacttaccctactgagttttctgaaaggaaggtctccatggagaagtgtaaattcctctctagcaggttgatggtggagatggaatctctgtctcaagacaaggcatcaggaaaagttgaagcatcatctatacttgagccagactaaggactccaaatgaaaccaccatgtcatttccagcccaaggttgcatatgctgagggactgcagcagaggagatatttatggcttcgtatatctgctgattagatacctttcctcctgttattccaactctgaacacatcagtttcctgggggacgttgccctgcactgaaacaaatgtcattgttgttttttttttctgtatcgtctattcccaagacactatgttaaaagtgaggtgtatccaggctttattactccttccccgtggacttccttggcttccagagtcccattctcctagcaccttctcccagccttcagtgaaaatttcctccaaagtctaaactgaggaacctgtcttgactaggtcccttgagtctccaaagcactggcttgtgatggaaactcagctcttgacatatccagaaaatggcaatttacctttgcaaggagatgaactgtgttctgttcatataaaaccatgggtactacatttcttggcttcatgttgcttttgccaaaacattagaatttcatatatatatttttttgagatggagtcttgttgtatcacctgagctggagtgcaaaaacattagccgggtgtggtggcagttgcctgtaatcccagctatgcaggaggctgaggcaggagaattgcttgaacccgggaggtggaggttgcagtgagccaatatggcgccatttctctccagcctgggtaataagaacaaaactccatctcactaaaaaaaaaaaaaaaagtgttagaacaggcaagcaggatcaactgattaagttcacagaaaaaaatggggggatttccaagtttgtgcagaaggacagctgcaacacattctgctttgcagtgaggaattcagggcactcatgctccaggacaccagaacccacagtccaaagatcccaggattcatgatgaccctgtagtgcagggggtgacagatggccacaaagtggtcataggccatcacagtctgcagaaatacattcatccctgcaaagagtaggaaaagtttgtgattctggaaaagtttcttgggaaaggacatgccttgcttctcggagacagaaatttgtgatcatgaagggacacctgcttccaggggtccacacggggaggagattgcatgagtgtccttccacgtctgctttattatactcagggacatcttctctgtcctcctctgcctggctccaaaaattcacattaaaaatgtttagactccttttattttattttatgttctggggtacatatgcaggatgtgcaggtttgctacataggtaaacgtgtgccatggtggtttgctgcacctatcaatccatcacctaggtattaagccccacaggcattagctagttttcctaaggttctccctcccccccaccccaccccccaacagggctcagtgtgtgttgttcccctccttatgtctatatgttctcattgatcaggtcccacttataagtgagtgcatgtggtatttgattttctgtttctgcgttagtttgctgagggtaatggcttccagcttcatccacgttcctgcaaaagacatgaacttgttcctttttatggctgcatagtatttcatggggtatatgtaccacattttctttatccagtctatcactggtgggcatttgggttgattctatgtctttgacatgaacagacacttctcaaaagaagacattcctgtggccaacaaacatatgaaaaaaagctcaatatcattgatcattatagaaatgcaaatcaaaaccacaatgagataccatctcatgccagtcagaatggcaatgattaaaaagtcaagaaacagatgctggcaaggttgcagagaaataagaatgtttttacactgttagtgggaatgcaaattagttcaaccagtgtggaagacagtgtagtgattcctcaaagatctagaaccagaaataccatttgatccagcaatgccactactgggtaaatatccaaaggaatagaaatcattctattaccaagatacatgcatgagtatgttcatttttagactcttataacctgctctgctatcttttaatcttgggaatatctgtaattctgataattcttgttgcgtcaatttatttctccagctcttctggaaactccaactattaatagaaatcttatcttcctcattgccagagtatagcatgtggtaaaaatacaaaaatagacatggagaaaactgtagataaaatttatacacatttaatttcaacagaagtatgaaagactttcatgtctgtagggaccagccctacagggtctgtgggtttttctcctcgtgtgtggagacaatagattgtagaaataaagagacaagacaaagagaagaaaagacagctgggcctgggggaacactaccaccaagatgcggagactggtagtggtcccgaatgcctggctgcactgttttttattggatacaaggcaaaaagggcagggtaaggagtgtgagtcatctccagtgattgataaggtcacatgagtcacgtgtccaccggacagagggcccttccctgtttggcagtcagggcagagagagagagagagagagagagccattatttcttctatgcatttcaaagacttttagtattttcactaattctgttattgctatctagaaggcagagccaggtgtacagggtggaacatgaaagtgaaacacgggcatgaccgctgaagcacagcatcacagggagacaggcctccggatggctgccggcgggcctgactgatgtcaggccttccacaagaggtggtggagcagagtcttctctaactcccccggggaaagggagactccctctcccggtctgctaagtaatgggtgccttccctagacactgatgctaccgctaggccaaggagccctctagtggccctatctgggcgtgacagagggctcacactcttgtcttctggtcacttctcaccatgccccttcagctcctatctctgtatggcctggtttttcctaggttataattgtagagcaaagattattataatattggaataaagagtaatgtacaaactaatgattaatgatattcatatataatgatatctataatctacttctagtataactattcttattttatatattttctttattatattggaacagcttgtgccctcggtctcttgccttggcacctgggtggctagcagcccacacatgtctgtttctccctcaggtagatcattttatttttcattcatttattacctcccctattgtctataggtggatggtgcttttccacctttggctctgggtcttgacaataattcacttgggaggagtgtgtatccctaaaacggttgatgcacatcttgaacatgtgacatgatttgtctaacagactgtgagcagtcatgacatatttaatgcctgtgaagaaactgtaagaggcactgtgagattccaccacttctcttaatcttcctctctcaaagtgtccttgctatccaaaattcaagaaccaactagatttgggcagtcctatgaactgaatatttttatttccttaaaaaacgcttaagttctaattcccaatgtaaaaacttctctatcataaactcctacaggatgaaaaagcatgatattaaaccatttattattgagatggcttgttacacagcagtagcttactgatacattaatcaatgcaaacagaactagtgacattcagaataatcttctgcctcttcttttttcacagttgttctgatatttcaagaaaacatttgtgatcacctggttactcgtgtttatttcagataactgtattaaagtgaggcaacttttagattgccttcgggataaccaggagaagttgaaaggacatataggtttttgcagggataaattgtgactctaattcacaagtgtctattgacagaggcaatattgggcagaaattcaatgtcttgtgtgagtcattatttgaccatgaggaccaaagagactattaaaggaacaaagcaaattatgataaatttaatacacatattgttcacttacctacactttaatgcttatgagacagtttttaaaggaggagatatttttagaataatgcaaggagtcatattcgtagggagcagtagaaaattttaagaggaaaagcaagatggtacattgaaataatacagaccatgacaccaaatccttcactcagatgaagaaacctgattacacatggacaccaaatctccacacttccaggaccagatgtacatcatcaaaaacaaatattctatagtcattcagtgcatgactgatcattttattccatcacatttaacatcatctgtgactaaggatgtatgaggtcaactgacacataaaaatgtgcctttctttgtaaactgtatctaaaacatgtatttgataagctgtattttcctacctactctttatctttatcagaaaatataggcactgttgacgttgagctgaaatagagcataggaccccagtgaggcgagtaaaatcccttgcctagctgtaaaacacactagtattgaaaggagttagttagcttgccttaggtagatagcaagataaggattcctggagagcctttgactcatgggtcagtgcctcatctccatataatataaaaaaaaagcctggggaaaaaaaatgaagctgccggcaccaataagggaagaagcataggggattgtgtctggagacatgcccacggctgcacagataggaaaactcctggctcatttagataaaaactttcacaaacctctggctcactcagataagaaacaaggcctggcatagaaatgcctttgtcctttgtatagtcagtggcctcccaggaaaaagctttttctcccttcgtgggcatggacgcagtgggctctggtgggttccggtgggcactctacttcccttgttttggactataagtctggtctctatgaattcagcccctgattgatcctgggcaaaggtcctgggccaagctttctgaaaggtcccaggccaagatcctgagccaagctgagtcagcgttctccaagacagcctgcagactaaacacattgcttcccctttccagtccataaaaacctcagaacgggcctcatagggggcttcccattcaggaccccctctctgctggccgagagctttcttcttttccctccaacctcatctttgtgtccacgctccttaatgttcttggaggtaggacgaagaactctgggttttatctcaggcgagagactgttacatgttggtgcattgctaagacctcagcagtatgttcaagttgacattttcaggaagaacagctaaggttttcatagaaaaggaaataacagactcagaaatagaaaactgtgggctcagatattcatctaccataaaattatattaatgaccttacagttgccaagcgtagttaattctttgggatgaatataactcacccctgtatgagaaaaacttccatttgtttctggacctagtttggatgtaattttagaaaaatgacagaggacaaaaacagttgcatatcagagcagaaagctttattaagaaaaagtgtaaattttctaatgtcgtcaaggttaaagaaatctaaagtccagaatataaatactaggagaaaattctactttcacaatctgatccatgaatcataatttctggctaggggatttagagctctgaaatctcaagaacttctggaaaatggccctcctgtttctgctctctgaagaatcgattcagagctctgtttatgtctttattcctcaggctgtagatgaaggggttcagcatggaggtgaccacagtgtacatcaccgaggctgcagcatttgagagtgagttatgggttgcagcagaactaaggtacacacctacgcctgtacaataaaataaggagacaactgagaggtgagatgcacaggtggaaagtgctttattcatcccctgagctgatgagatcgaacatatgcaacaaagtatcttaaagtaagtaaaatattccagcgaggcatcccccacccagcagcacacttgtaaaattcatcatcatgtcattaataaaagtgtcggaacaggcaaggtggatgacctgattaagttcacagaaaaaatgagggattttcaattctgtacagaaggacagctgcaatgccattatgctttgtaacagagaatataggatgctcacgatccaggacaccagaaccagcagtccacagagccaggagttcataatgactgtgtagtgcagggggtgacagatggccacaaaccggtcataggccatcacagtcaggagtaagctgtccaacactacaaagagtataaaaaagcacatctgggtgatgcagtctgcataggtgatgactctgctctgtgtctggatgttcaccagcatctttgggacagtggtagacacaaaacagatgtctgcaaaggacaggttggagaggaagaagtacatgggggtgtggaggtgggagtctgagattgtggccaggatgatgagcaggttcccgagcacggtgaccaggtacatggacagaaatagcccaaagaggaagggctgcaattctggttcctctgaaagtcccaggagaaggaattgtgaaatttgtgtctcattccctggtttcatcttgttgatgtgacttccaaaagagagagaaagagaacatgacacaagcatgcattacaaacatatcagaaatattctcacttatattctacagtcaagaagttaatatgggctggctgcagtggctcacgcctgtaatctcatcactcgcggaggccaaggtggacggatcacctgaagtcaggagttcgagaccagcctggccaacatggcaaaaaccggtctcagctaaaaatacaaaaaaaattagccgggcgtgctggcgcatgcctgtaatcccagctacttgggaggctaaggcatgagaatcacttgaacccaggaggtggagattgtagtgagccgagatcatgccactgcactccagcctgggcaacagagtgagaccctgtctttaaaaaataataataaaataaaataataaataaataaataacttcctacaatttaatgatgaatgaaaaatacaagtatgtttttaaaatgccatcctcaatatcagatggtgatgcatcctatgaagaaggaggttagaaggaaagagtggatggggtaatagattttccagggtgttcaggcaggaccagcagagaaggtgacaaatgaagagagcccataatgaagacagggtggagggcactacgttccctgcagaagtttgtgcaatggagcaaaatgatcaatgaaagaccccgaggaatgtgcttctttcagatatttgaggactgcgaagaagacagtgtggccggggaatgagcaagaggcgagggctgtcggaggatgttagggaaggaagtgtcctcatagctgctgaaatttgaagacacaaagagtccctctgtccagatactgatgcctttaatttggctgcaaaggtgtttcatgaactgcaatgcatgctcattctgtttactgatattttcctgagatgtggcctttatctgatgggttaccttttgaaatatagagatcaggttccctatctctgaaacctgtgctcactctaaagttgtgcacccacacacgtgcacacacacacagagaacgcacccacacaggcagccatggcttcctggggccatgttaccccctcacgcttctcatcccactcacagtattagaaaggaatggataccaggcaagctgttaatatcaaattatctttccccaagaagatacagatatggtacctagaatttccagtttgaaaacttctcatgcatatggaacctcgagcgccactgcactccagcctgcgtgacaaagcgagactctgtctcaaaaacaaacaaacaaacaaaaaaccgagaggcagagagagaaaatcgattggaactgaagggaaaaataatctaataagctcacatagtccctcagagaccttaaggaagaaaaggcttccttagttttgaaaacattccaactcctcttatatccctgaggcccagcaaaaatcagaaaagacaaagggaaatttaccaaatatcaaacatggtgatatcttttctgtgtcaagatactgatagattgagaatccccatggaaaaaaaaatgagcaaatgataaaaatcaactattcaaaaaggaaatacaaaaggaacttctgggccagcttatttattgtgctggggtctgtcctgtgcattgtacgatgtttatcagcttccctgttctctactgaccctccccagggtgacagccaacccagtcattgctcaatgtcccctgggagacaaaaccacccctgggtaagaaccgatttttaacataaaaatcacaaaatatttccataccttttatcaactgagaaaggacaagggaagatgagccttaaaacaaacaaacaaacaaaaaaacctatagtcaaatataaaaagcacatgtgttatgcataacatactactcaacctttgtataaacctttgtgtaaagagaaggtttatgaggaactaaaatcttatggagaatagaatataagtgaggatgctattaggttaagaacagttatttcattttatggctgcatagtattccatggtgtatgtcctttgcagggacatcaataaagccagaaaccattatcctcagcaaactaacataggaacagaaaaccaaccaccacacattctcacttatcagtgggagctgaacaatgagaatgcatggacacatggaggggaacaacacacactgaggtctgctggcggggggggtggtgggagggagagcattaggaaaaatacctaatgtatgctgagcttgatacctaggtgatgggttcataggtgcagcaaaccatcatggcatacgtttactacctaacaaacctgcacatcctgcacatgtaccccagaactaaaaattaaaattaaaaaagaatagttatttcaaaacagctgcatgaatcaacatagaaagaaagtctgaaaaatccttatagaaaaatatgacagtaataatttactgacataaagatgcaccactaattcactgtgaaatcgcctcttggaaattgaagaatatcacaggaaaatgtttaaaatgtggggaggaaacagtatctaaggttataatttcgtattatataaacatataaagcttcaaatgtttaggggagatagatgtgaggtttaatcagatgataagcagccagattaggactccaaaaggaaagcatgtcccatcaagcccaaggtagcatgtgctgaggaacagtagcaggggagaaatttacagctttgtgtacctgctcatcaggcaaacttcctcctgttactccagccttgagcacatcgtgtccctatgagacattgctctgcgtggaacttttttatttttcttgcattttctgtatccaaggcaccagattaaaagagaggtgaatccagttttattacttcttcactatggacctgcttgccttccagaaatgtaatctgttaacactgtatcccaaccctgggggaaggtttttctccacagtctaaactgaggagcctgtctttgattagatcccttggatctgcagagcattgactgtgatgggaacacagacattgatatctccagagaatgactcttcccctcttcagcaagggagtgaactgtgttctcttgatagaaaaccatgagttctgtattgcttggcttcatgattcctttggcaaaataatgtaattttgcatacttccttaaccatacatctttacctacacaaaaaaattaaatgttattcagtaaagttagcaggaaaaaaaatcttccaatccattgtttgaaagaatgcaatcaacataatagtataaaaaacctcagaaaccagaatataaaagcatagaacgtgcacaatttgcaatggagaaaatgaaagctactaaaccctcaggtagagtatactcagactcaacagaaagcgaggcttaaaacttagatgacaggttgatacgtgcagcaaaccaccatggcacatgtatacctctgtaacaaacctgcatgttcagcacatgtatcccagaacttaaagtaaaataaataaatacataaataagaaagtctttgcgatagtttgctgagaatgatggtttccagcttcatccatgtccctacaaaggacatgaactcatcattttttatggctgcatagtattccatggtgtgtatgtgccacattttcttaatccagtctatcattgttggacatttggcttggttccaagtctttgctattgtgaatagtgccacaataaacatacatgtgcacatgtctttatagcagcatgatttataatcctttgggtatatacccagtaatgggatggctgggtcaaatggtatttctagttctagatccctaaggaatcgccacaccgacttccactattgcaaggacaaaaacccaaacacctcatgttctcactcataggtgggaactgaacaatgagaacacatggacacaggaaggggaacatcacacaccggggactgttgttgggtgggggtggggggcggggagagcattaggagatatacctaatgctaaatgacgagttaatgggtgcagcacaccaacatggcacatgtatacatatgtaacaaacctacacgttgtgcacatgtaccctaaaacttaaagtataataataaaaaaaaagcagaaaaaaaagaaagtcatggcaagtaaaaactctttagtgttcccattttgacgataaaataacatttattttattcaggtgaatatttagcaagagagagaagatactgtgaaatgtctgtcttgtgaactactgttgcaaggtagtatttgtaagcagcccgttggtctagatctttctaatgaatacagaaacatgctccaatacactcatcttaattttaaaaataaaccctcaattcattgcacatccacccacacctaatattctacattctactctcctacttctttttttgtgtgtttgtttgtttttgagacagagtttctctgttgtgcccacggcatgatctcagctaactgcaacctccacctcctgggttcaagcgattctcctgcctcagcctttcaagtagctgggactacaggtgtgtgtcaccacacccagccaattttgtatttttagtagaagatggggtttcaccatgttggtcagattggtctcgaactcctgacctcaggtgatccgcctgcctcgacctcccaaactgctgggattacaggtgtgggtcaccgtgcctggcccctttcctacttctttaactgcaaacctcctaggttctaacttcactggaaccactttatgtcttccattccttcttcaatctcatccaattgaacctccatatccctcaattaattgtcaacaacaatccctgcattgctgagtcttacagacacattttaacatataaaataaataaattataaattagtcaaccaggcaaacaaacacacatgaatctctcacctggcttgatactaggtgacctcaggtaaacattcttggcttccattctctttgaacatttcctgcagtactttctggggtctcagacgcacctgtatggggtctcagagatgaaggtctctgtgtggaagttgaaattcctccctgggtagttgatgatgcagactgaagctctgtctccagacagacagaagggaagagttaagcatcagccacacagccagacttaggactacaaaagaatcaaccacatcccatccagcccagggttgtctaatcccagagacaatagcagatgaaatatttacagctcctaatatctgctagcgagatatatttccctgttgctactctaagcctggagcacctgatttccctgtggaacactgatgtggaaagaaagaacaatttcctgctgattctctgttcccaagagaatcaagttagaagtcatgtgaatccagtcttcattactccttctctttgaactctgtaccttccagaggtctaagtgccattgcaccttttcacagccctcaattaaaatgttatccaaagtgtaaggctgagtacatggtctttactagatcccttggatattcaaatcattgacttgtggttggaacacagctgccgacatctccagaccaacgctctttcctcatcaaaagggagagaactgtgtttatttgtcataaagccacgggtatttactacagtccttggcttcctgatgcttttgacaaagcaatgagcagtttcttgcttgtaaacacacaagcatcaaagtacaacttatcattcagtccttcctttataaaacatttggtaatcataagagatatacttaaacctttgtagacatcatggaataagttaaaatcttatatggtttgtctcatttaatatcacatgtaatgtgtctcatttttatacatctttgttctatgaggtccaacgattagacgcctctttctgcacttttaggattttggttaaggtgagttagtgacctgcccaaagttatgaaccaagtaagggaagggatttgatcagaatgccatccaaatgtttccagttgtcacatctaggttactgacttttcttttctttacttttttcttttctattttctttcttttttttttttttttgagacagagtttcactcttgtcacccaggctggagtgcaatggtgcgatctctgctcactgaaatctctgcctcctgggttaaagtagttttcctgcctcagcctccagggtagctaggattacaggcatgtgccaccatgcctgggtaatttttgtatttttagaagagacagggtttcaccatgttgggtagactggtctccaactcctgacctcaaatgatccacccacctcagcctcccaaagcgctaggactacaggcatgagccaccgtaccgggccaggttgctgattttcaaccaggggtgtttgtgctccaggaatattaggaaatgtttggatacacttttggttgtcacatgtggggaagtgctacttactggcacattgtagattgaagccggggaagctgcccaacaacctacaatgcacaggacagcccacagcagaaagaattaatgcaaacaaatgtggacactggggaggctgagactattccagtccagaacttccctaatttcactgtatatatgaatcacctagggttcttgttcaaatgtcgattctaatttcagacatctaggactggtcccaacattttatacttttgacagttttcctgttggtgttgatgctattcatcctgttctgcggaacactctttggggatcgaggctgtggtcagtgttaaaggcaggtatacatattttgaggctttttctaccaagaatcctaccctgctcctcatgtctggtttaggaggtcaaatgttggactcggtagctcagcttttgcataatcgagtttacttacgcgtaagtcttgaacacttacggaatgacaggaaatgaaacttctagaagttccacttaccttatgaagtttaggtgagaaggagtaagacttcaaagcccattggaagttacttggcgcagagcaggtgttcaatggatagcagatatttggaccatgtcctagtttcccagttactctgctcattgtgacaccagaaaggtttcttgctacagtctagcactgtcctgctttgaggagacagcaagttgtgatcatgaagggagacctccttccagggccctgcacaaggaggagagtgcctgagagtctatcattctatgctttgttgacataaaatcattcatcattgtctctgtcaccctcatgctggctccaaatactcacagtagatatgtctgactctttaactatcttctacttttgagaatatctgtaaagctgatgtttcttagtgtatcaaattatccacctaatcttctaggagctcctccaactcttcatggaaatcttatcttcctggcttctaggtgatagcatgtaattcatacatatttaatgtatactgaagtataaaatgcttgcatgtctgtttttctcccagtagataattattttccacttatttattaactcttagataattagacacctctttctgtatttttgtgttgcctttctatgttgcctttaggaggatcagtcttctccacctttggctctggattttgatgatgcctcaactgggagaagtgtaacacctacgatgattgagacattctttgtctgataggatgtgagtggtcatgagatgttcaatctgtgagaagaagctgtaagaggcattgtgagatgacaccacttctgttgctcttcctctttcaaattgtccttgctctattatttaaaagtccaataataacaaatgctggtgagagtctggagaaaaggaaatacttccacactgcttttgggaatgtagattagttcagccattgtggaaagcagtttcacagttctcaaagaccttaaaacaggattaccacttcactcagaaattctattattggatatatacccaaaggaatgtaaatcattctactataaagacatatgcatacatatgttcatcacagcactattcacaatagcaaagacatggaatcaacctgaatgtccatcaatagtagaccgaataaagaagatgtggtactatacaacatagaatactacagagtcatcaaaaagaatgagactgtgtcctttgcaacaacgtggttggagctggaggccataattcttagcaaactaacgtaggaacagaaaaccaaataccacatattctcatttacaagtgggagctaaataatgagaacacatggacacaaagaggggaacaacagatactggggcctccttgagtgttgagggtggtaggagggttaggataaaaaaaactatgtatcaggtatgcttattaagcgggtgacaaaatactctgtacaccaaaccctcacaacaaacagttggcttatatagcaaacctgcacatgtacccctgaacctaaaataaaagttaaaaaaagattgtccttactgcccaacattcaagagctaattaagcttggatagtcctatggctgaatatttttgtcttgtccaggatatatatgtcctaatccccaatgagaaaacttccacaatgtagactctgatgtgattttttaaaagcatgactttaaatcatttattattgggatgttttgttacacaacattagattactgatacaataatcaaagcaacataactaaagatattcagaattatctttttttaggtgtcagatccttttgttttttagttttttattggattcactgtatacagaatattctgttggctctttttttttggtgctttttctgatatcagaaagcagtgttcataattatatggatatttatatttacttcacataactgtatcataggatgactacttttagatttcctctaggtaaccagaagagtttggcaggacatgtatatttttgctgaaacaaattgcaacctggaatctcaagtctctaatctcacatgcaatactgggaagaaattcaagctcttatgtgagtcatcattagagagtttggagtataaaagagataaagcaagtgatgatacagtaaatacacatatccttcacttacctccagtttaatgcttgtgacataatttattaaagggagtgatagttttagaacaatgcaagaagtcatatttgtagcactggaaacttttaatcagaaacagaaagatgatgcaatcaaataatgtagatcatgacaccaaatcctttacctaaatgaacaaacctcattacccatggacaacaagcttccaccctttaatgagttgtattagtccgttttcacactgctgataaagacatacccaagactgggtaatttataaagaaaaagaagtttaatggactcacagttccacgtggctggggaggcctcacaatcacagcagaaggccaaaggcatgtcttgcatggcggcgggcaagagagcatatgcaggggaactcccctttataaaaccatcagatctcatgagacttattcactgccatgtgaacagcatgggaaagacctgccccaatgattcaattacctcccaccgggtccctcccatgacacaaggaaattatgggagctacaatcaaggtgagatttgggtggagacacagacaaaccatatcacacaccatcaaaaacaaatcttccacgataatcactgcatgactgaaaattttagtccatcatatttaaggtcgtctctgaatctgaggccatatgaagtcaattgattcatgcaaatgtgtctttctgtgtagactacactaggaacatgtatgttataagtaatattcgccttcctcctctttaccagggaatatagtaggcagtgtagacactgagctggatagcagacaggatcctaatgaggagaataaaatgccatgatgattataaacacaccagcatggtcaagtttacataatcaggaagaacagtaaaggtagtaagaaatgaaggactcagaagtaaaaaactgtgatctcagatattcatctataatatgattataccaatgaccttacatttgccaagtgcaattgattttttaggactgatacaactctctagtgtattagacaaataggaatctccaaaagtgttttaccctagtttggaaataactatgggaaattaggaaaatgacaaacaaaaagtaagttggatatcagagcagaaagctttctaaagaaatagcataagtctgacacagcacttgagaacaaggaaattaaaactctagaaactgaatagaagcagaacattctctttccctccttccatgatctgattcgtgaatcacaatgtttgagttcggttagagctttgaaatcacatgtacttcttgaaagatgctcattttatttcttccttctgaagaattgttttagagccccctttatgtctttattcctcagactgtagatgaaggggttcagcatgggggtgaccacagtgtacatcagaggctgttgcacttgagagtgagttgtgggttgcagcagcactaaggtacaccccaaggctcatacaataaaataaggagacaactgagaggtgcgatgcacaggtggaaaatgccttgtacttcccctgagctgatgagattgcacgtatggaggaaactgtcttaaagtaagagtacaggatcccagtgaaacatcccctacctagaagcacagctgacaaatacatcaccatgtcattaagaaaggtgtcagaacaggcactgcggattatctgattaagttcacagaaaaagtgggggattttcaagtctgtacaaaagagcagtggcaacaccattaagctttctatcaaggaattcagggcactcatgatccaggacgccagaaccagcagtccacagagccgagggttcacgatgaccgtgtagtgcagggggtgacagatggccacaaactggtcataggccatcacggtcaagagtaagctgtccaacactataaagagtacaaaaaagtacatctgggtgatgcaacctgcataggtgatgactttactctgtgtccggatgtttgacagtgtctttgggactgtggtggaggtaacacagatgtctacaaaggacaggttagagaggaagaagtacatgggggtgtggaggtgggaaccagagcagatggccaggatgatgagcaggtttccaaacacagttgtcagatacatggagaggaagagtccaaacataacgggctgcaattctggttcctctgaaagtcccagaagaagaaatcctaaaatcctcgtaccattctctggttccatgtggttgaggtgactaccagtcagagaaagagaacatgaccaatttttactcaaaagggcatcactcacattgttgaaagacaaccagttatattttgcagccaagacattaatttctatattttgtgtatggaacttttcccagtttctgtgctcctcagagctgtctctgattgaaaattcttgtgctattctcaacctttccctaagaggttgtatattctttaatgagaaattcttctacgcacttgtgtaatattgattgtatgctgaccatgttccaggaactgtctaggtaatgagtgtagggtgcagagaaactgataaccttactatccaatgatggagaaagacaatgagctgataaagacatcatcatctgttgcgttagatggtgcttagaagaaaatgaaagcacattaaagagaatggagaggggttgctattttttatgagtgtacaggcaagaccagcagacaaggtgacatttgaacagagacctcaaggaagaggcggttgggagcccagaggatatttggcgaagtctgtgcctgacagagggaatgactaatgcaaaggcctgaggaaggtgcttgtttcggaaaatcaaggctcaaatagaagccagcgtgttgagggcaatgagaaggagggagagtgatcagagatggtgtcaggagtattgaggaaccaggtggtctccctgctgctgttgaaacttcaagacactgacagcctcgtctccccatgtggttctgagccctctattaatgtggccccctaaggacgtaaacagggcagcaaattccagcccaaaagcttcccatgcacatgtaaatgtggggctccattttatatcatcactttgtgcctggtatttaacaaaatacatgagaatttgctgaataaacaaagagatgcatgaaataggcatgatgtacacaggtggttgatgagagactgtgacgaaaacagcttcctcgtttctggcaatgttcaatcctggttatagaccccgatgcccagaataattcataattaataaaagtgatatctttatagggtcaagacatcttacagattgaagaccccaagagaaaatgaagaaagggaataaacccacacttcacaaaaggaatcacacaaagtccaacaaaagcggggggcggttaaagatgcaattgtgaaagacatgtgtaaattgtagtaaatgcaaagcaatgtatgtaaaaaacttggcatgtctcatttttgttcttaaatgaatggttatcactggtgatgagatgagactgatgttgctcttccacctctcatttacctgttttgtaatgtgaaacatctatcatcacaaaaaaaagtttggagttttgcatctactctgtacctgctgttggaccttgaaaagcctataaagtcattctaaatttttaaaaattttttataaatacataatagttgcacatatttatggggtacatgtgatactttgatataagcatacaacgcataatgatcaaatatgggtaactggcatacctgccctctcaaacatttatcatttctttgtattggaaacactcgtatcttctcttctagctatttggaaatatataataaattattaagtatagtcattctattgtgctgtggaacagtagatcttattcctttcatctaactgtagaacttattcctttcatcatcaaaaagcatacacatagaccaatggaacagaagagtaaacccagaaataaattcatgcatttacagccaactcatttttgacaaaggtgccaagaacacacattggaaaaagacaagctcttcaataaatggtggtaggaaaactggatatccacattcaagagaaatggaattagatccctatctgtcactacatagaaaaataattttaaaatagaaaaaaagacataaatgaaaggctcaaaactatgagattcatagaataaaacataagggaaattcatggcattgatctaggcaagtaatttttttgcatttttaaatttattattgctatttttaaaaattgtcatttttattgtgggtacatagaaggcatgtatatttctggagtacatgggatgttttaatacagctatatgattcatatcaatcacatcaggataactggggtatccattgcctcaagcatttatcaatcccttgtgttagaaacattccaattccactcctttaattatttcaaaatatacaataaattattgttgactacaatccccttgttgtgttattaaatattagatcttggccaggcacggtggctaatacctctaatcccggcactttggaaggctgaggcaggcagatcgcttgaggtcaggagttcgagaccagcctggtcagcatggtgaaacctgtctctactaaaaatacaaaaattagccaggcgtggtggtgcatgcctgtaatcccagctactcgggaggctgaggcacaagaatcgcttgaactcaggaagcagaggttgcagtgagctgagatcatgccactgctctccagccagggtgacagagccagattccatctcaaaaaaaaaaaaaaaaaaaaaaggatcaaaacgaacaaatgctaacaaggatgcggagaaaaaggaagtctttttctttttcttttttaacaagagacaggaccacactgtgtcacccaggctggaatgcagtggctcaatcatagctcactgcaaccttcaactgggctgaagcaatccttcaacgtcaacctcctgagtagcttggactgcagtcatgcaccaccacacccagctaattaaaacaattttttttagaaaagaagtctcattatgttgtccaggctactctcagtctggcctcaagcagcctcccgcctcagtctatccagttgctgggattatatctataagccaccaggcctggctaagaaagagaagctcttgtacattgttgctggagtgaaatttagtacacttattatgagaaacaggatggaaattcctcaaaaaaataaaaatgcaactaccacataatccaacaattctactactgggcattaatcaaaaaaaaaaaatgaaaagagtgtatcaaagagatatctgcactattcactcttttttttttttttgagatggagtttcactctttcacccaggctggaatgaagtggcgtgatctcagctcactgctacttccatcccccgggttcaagtgattctcctgcctcagcctcctgagtagctgggattataggtgtgtgccaccacgcccagctaatttttctatttttagtagagacggggtttctccattttggccaggctgttcccaaactcctgacctcaggtaatccatccgccttggccacccaaagtgctgggattacaggcgtgagccaccgtgcccggcctgataagctacactattcacaatagccaaggtatgaagtcaaagtgtccatcaatgaatggacttttagaagtaatatacatagacagtggaatgctgttcagcccaaaaaagaaggaaatcttatcatttgtgacgatatggatgaacctggagaacactgtgttaagtgaaataaaccagacacagaaagacaaattcctcatggtctcattcatatgtggaattttaaaagtcgatccgatagaaatatcaattagaatggtggttactagaggctggggcagttgagggagaaggggtatgaagttttttgttgaaggatacacaattgcacttaggagaaataaattgaagagatctgttgtaaagcacactgactatttgatgatgatatattgtattcttgaaaaacgctaagacagtaggtttttgtttgttttgagacagaattttgctcttgttggtcaggctggagtgcgatggcacgatctcggctcactgtgacatctgcctcccaggttcaagtgattcccccgcctcagcctaccgagtagctgggattacaggcacccaccaccacgcccagctaatttttgtatttttagtagagaggggggtttcaccatattggtcaggctcgtctcgaactcctgacctcaggtgattcacccgccttggcctcccaaagtgctgggattacaggcgtgacccacagcacctggcctaagacagtagattttaagtgttctcaccacacacacacacacacacacacacacacacacacaaactaggtgaggtaatgtgtatagtagttagctagctttaatcattccacaatgtatatatacttcaaaacatcatgctgtacacaataaatacataaaattgtatctgtcaattttaaaaataaataaataactttgtaaacttaagatgatccttataaggtgctaatctcagggcagcttgcataaaagggtcttaatatatctcataattaccaaatgttttatacttggaggataaaataatagttcttaacctgggttataagtatgaaatgtctcattgttctggctaaagcatgatgcaatcagacaagtagtaaccacgcttttaaatcaagagaacacagttcacctcttgctgaagaggggaatagcaattttccagagatatcaagggctgtgctcccagcaaaagtcaatgctttgtagatctaagggacctagccaaaacagcttcctttgtttcgactttggagaaaatgttccctcagggttatggtaatataagaggaggttagaactctggaactcaggccagtcgatagagaaggagaaataaaggctggatgcacctcatgtttaatcaggtgtcttgggaacagaggatgcaggaacaaatatatatatatatatatatatatatatatatatatatatatatatatacaaaaatatatataaatatatataaacaaaaatatataaatataaataaataaatatatatatctatatatatacacacacacacactatatactatatacacacacatatatctttcagtgccaggcaatgtcctatggggatgtgagtggtcagggttggaataacaggaggaaatgtgccaaatgaacagatatacaaagctctaaatatctcctctgcgttggccctcagcaaatgcaaccttggcctgaatgggacatgcttgtttcttttggagtcctccgacttggggactgatgctttgctttctgctgctgtctggtctcaggacagcttccgtctccatcatcaacaatccagggaggaatttgcacctcctcatggaggccttcctttcagaaaactcagcaaggtgagtccaatagcctcagctggtaccagtaggtaccgtaggaaatgtagctaactactatacacttgaccttacctaggttttttttgtttttttttttttttttttctgttgagaacacttaaaatctacttcttaggccaggtgcggtggctcacacctgtaatcccagcactttgggaggacaaggcagttgaatcacctgaggtcaggagttcgagaccagccttgccaacatggtgaagcccaccaccgtctactaaaaatacaaaaattagctggggcgtggtaatgtgctccagtaatctcagctactcgggaggctgaggcggtaccagtaggtaccataggaaagggtcagagagaatggcagctatgaccatggacctgaggtcacctgagagccagtctagactagccctgagcagagaaacttctgcgatcatttgtctgcttgcttgattcatttattcatgtatttgtttatgatactaaaaagaaaagtgaatattgagctcagaattgaagagtgattattgaaagttaagtaagggtaacggaagcccagttggaaggggacatgggagatttaaagtggctccagtaaaagtagaacatttgccctagcatttttgcaattaaatggagaagagaactaggctattagctgtgaagggagatacactgaagtgagggcgtgccttttttaggtttaagaagagacatatttgaggatgttttcacattgatgagaaaggtctaaaccaatgaattgcttccaaatgctacctgaccacagcagtttatgagacaaacatcttgcagtgtcttctctcatgctgttcattcaaatgaaagtttagaagttattcagtaaatgaaaagtgatatactaacaacactaactttgcaattctctcctcacttgtgaggctaaatatatttctgtgtttgttagacatttaccaactctattgcaaattatctgtgcatgttctttgcttttgtttttgttttgttttctgtttttgtttttgttttgttttgtttttgagacagggtctcactgtgttgcccaggccggagtgcagtgacatgatctctgctcactgcagcctctgcctcctgtgttcaagcgattctcctgcctcagcctcctgagtagctggtattacaggctcatgccaccacactcagcttatttttgtgttgttagtaaagacggggtttcaccatgttgcccaggctggtctcaaacttctgacctcaagtgatctgcccacctcagccttccaaagtgtgggattccaggagtgagccaccatgcccagccttgttctttgcttttgtatgatgggtttgtaatgttcttattcctatttttattgcatttttgaaataaaaattggagttgttttcaccgatgttggcatttgtcatgtcattcttttatatatgtatcagtgcatttgagaggaatgtgtgaaaggtcttttttttgttttttcttttttttgagatggagtctcaccctgtcacccaagctggagtgccgtgtcgcgatctcggctcgagtagctgggatgacaggcacgtgccaccacgccctgctaatgttttgtatttttagtagagacagggtttcaccatgttagccaggatggtctcaatctcctgacatcagtttataaagctgatgtagccaaatccatccattggtcatagtgtgtcccctcgttgctttgtaaatgcagaaagctctgtatcattttgccagataaatatccttttatggattacatttccaacttgctttcatagctctgtcatgctttattgcaccttttggctttttgaatttgacctctgtctagaagttgcatctcctttggccatcatttgaaaatcattctttatcatctgactcaagaccacttttatctctcataaacatatttgaatcttcccatatttatgtcatatgaaattataaccttagatacatatgaaggatgaaataacagctcttaacctgtgttataagtatgagatttctaattgttctggctaaagcatgatgaaatcagataagtagtaaccatgcttttaaatcaaacctgctcctacttttttttttttctgagacagagtcttgccctgtcgcccaggctagagtgcagtggcgctatctcagctcactgcaacctccgcctcccagattcaagcgattctcatgcctcagcctcccgagtagctgggattacaggcatccaacaccacgcctagctaatttttgtatttttagtagagatggggtttcaccatgttggccaggctggtctcgaattgctgacctcatgatccacccacctcggcctcccaaagtgctgggattacaggcgtgagccactgcaccaggccagtttctgtgaacattctttttctatactatgcacacatacattttatgcaaatgcacgaatactacagtttatgcaaatgcatgaatactatcctatgcatatcactaatactctatataatagtgtaattttttcatattttttcccctttccttttctattatacaaatcttctaaaagtactttcaaacatttatgttaagtctgtggttctcactgtggtggctttgtctgccaactgacattgagcaatgacttgcctggggagggtcagtaaagaacaaggaagctgttaaatagtacaatgaacaggacagaccccagcacagtaagtgatgcagcccagtatttcagtagtgctgggactgagaaacttgagttaatgaatatctgtattactaatatttatagctgcatctagattgcttccccaagaccctgtaacacttcacatttctgccaggaaaattagagtccccctttgctgcctcttttaaacatccaacccctctcaaggtggcagctgttgaagcttttccccaggctgatggttgtgatagagatttcttgttgtcttaaactattcctgggcttgagcagacagtcatatatatgatcatcgtttttacctacttattattatatgcccatttttctataatttgccacatttcaagtgatttttaaattgtattgcttcttcatggacttgcaagggtatactttttcttatttagctaactacatactaatcttgcttctgtttcttgcctttgttaagatgttttccctacacatagattttgtgtgtgtgtgtatgtgtgttataaatacattttcagtgccaccaaagaaatagcatttgaacatcaatttattttctcagcaaggcaatttttacttctataaaagggtacaactcgcagatggagtaatggtgagagcacacctgaacaagggaggggaaggggtttttattcctgacccacatagcccctactgctgtgtcgttcccctgttggctagagttggaccgcacagtctgagctaattccgagtgactattttaaagagagcaggggtaagagccagaatggcgtggtgagcagtttggcgggaaagatggttacacaacaggtaactaaaggtgacttaggtcagagtgggtgaccggggtgactcaggtcaaagcaggtgaccaggttgagtcaggacagagcaggtgaccaggggaacagatgtgaactactgattaaaactggtggaaaaggtgtttactgaaactacaaggaagttaaactttaaaatggaggacagagaactgaacatattgacatactgattctttgaagacaaatctagaattcactgtatccaacacatgcattttttacttttatactgaggtctttaaacctgctaattctttataggccatgagagagtgggcgaactaattgtctccaggtggatggccatttatagcagctgtcactcaatgatccaaataaattgaaatacaatcttgcatatgttaaatattcatatatattgagacttatttcctgatcattcaacaaatagcatctgctatgtgtcagaacattctaggaatgctatatattatgtaattttatatctaggatgttgccaaataaataacgaattcatttgatatcattaaattattattttatatcttgcttcagttaatttttgatgatccatacaattttatttaatacagcttttgaaattattgtatttaccctggctttattcccctaacattctttttatttcctatcttcttgctttaaattgttggtatataaaacacacatatttgtatatctttgtgaaaatacaaaggtaaacacaacaggagaagttgtacctgtgtggatcttgcattataatgattagagcagagtacaatgctataaatgtgcatataagacaatgtaggatttcattcattgcaaatggttaaaattatcatcatctatgtgggattttatagagtgtggtctggagaggccattgcatgttagatgaagaccagaaccaggactaaatggggccagcggaatctgtcaaaacagaagaccacaaaccacaaaggaaagatgccacacaagaaaagtgagaagggggctgcctcacctactatcagaccatataaaaaccccttgatttaaaacatattaaataagcacaagaaacaacaagtcttctactgtttttgtaaaaaacaaacaaacaaaaaaaatgaattgttggtttatttcatttgctcattttttattggcattctcaagctgtaggtgtcttgacacagagaaaacataattacgtatgtcatttggtaaatttcctttgtcatttataatttttgctgagtatcaaggggatatagtgggactcaaaatatctccacaactaataatgatttttctttcttatggtcccttgtagatcacctgagacttttagaccatttccctcccataatatccacataatttttctctctgtgtgtttattgagaagattattttctatttctttaaacacaaggcagaaaatagccatactaaaatggagctcaaggctacttgtgcatcgagatttccaaagtggaatttctagatatcatttctgttttctctcaagagaaaaattaattgatattgacaacttgcctggtacccactcctttctagtagtatgattgagcacaaaagaatattggtgtaacatagacccagggggtcatggtatgctccatgtgtgtatacattgtgtgtgtgtgtgtgtgtgtgtgtacatgcatgcacgcatgcctttagagtgagaggaggtttcagagaaagggagctttggctctatgttccaaaaggtaactcatcacacagaggccagaactcaaggcaacagtaacagtagcaaacaaagaagaaatgcattgcaattcatgtgacactgtttgcagccaaattagcaaagtgccaatgcaacaacatctggtcagagggactccttgtgtcttcaatttcagccacttcaaagtcagctctttccccaacatcccctgaaaccatctctcatccctctccttttgctcattcccctgctacactggcttccttgctggccttgaacatgtgcaagaagcacattcctctgagtctctcattaatccttccttctgccttgcacacacttctgcgggccacatggtgacttctgccctgccttcactatggtctctgttcatttgtcacctggtctgctggtattgcatcaatgaccagtaaaaaaatagtaaaaaaaaaaaaacaaaaaaaacccaccccgtccacactttccttcttatttcttttttcctcttcaaagggtttgtcaccatcggataccatatggtgacaccatatggtatttctcttgtttgtttgtattctttctctgtcactgatttgcagcaactttttttttttttccggagtctcgctctgtcacccaggctgaagtgcagtggcatgatcttggctcactgcaacctccacctcccaggttcaagcaattctcccgcctcaacctccagagtagctgggactacaggcgcgtgccaccacatccagctatatatatatatatatatatatatatatatatattttttttttttttttttttttttttgtattttttgtagagatgagaattcaccatattggtcaggctggtctcgagctcctgatgtcaggtgatccacccacctcggcctcccaaaatgctgggattacacgtgtgagccaccccacccagcctgtagtgacttttgttttatagaactaattattcaatgtccagacagtatttgtaacacttcagaattcactttatagtcctcaaatgcctaaaaattttctcatgaatactgcagagttcatgcactcagggaaagactgtgagtgggacaagaattcctaaccagggttgtcaaagggatgccctaacagaggctagattcacacgcaaaatgtagaaattaacttcttgtaaaatggaggttaccagagcctgggagaattgggggaggggggttgttggcaagatgatggtcaatgaatacaaaattacagttaaactaaaaaaaagttcaagagatctattgtacagtatgttgactctagtcaatggtaatacattgtatttgtgaaaaatcctaagagagtggatgtagagtgttttcaccacaaaaatgatgactatgtgaggtgatattaattaatattaattgacaagatttagccaatccacaatgtaaatatacttcaaaacatcatacacagcaaatacaaacaattctgtcaacttaaaaagaaataaaatgtattttaaaaattaagttattgaccgtagaatataaatgacagcatttctgataggtttgtaatgcacgctttcatcaagttctttttctctcattttgaaagtcattatcaatcacatagaaccagggaatgatacacagatttcagaatttcttcttctgggactttcagataaaccagaattgcagcccttcctctttgggctgttcttctccatgtacctggtcactgtgcttgggaatctgctcatcatcctggccacaatctcagactcccacctccacaccccatgtacttcttcctctccaacctgtcctttgcggacatctgtttcatctctactacaatcccaaagatgctcgtaaacatccagacacagagcagagtcatcacttatgcaggctgcatcacccagatgtgcttttttgtactcttagaagcactggacagcttactcctgaccgtgatggcctatgaccagtttgtggccatctgtcaccccctgcactacatggtcatcatgagcccctggttctgtggactgctggttctggcatcctggatcatcatgagcccctggctctgtggactgctggttctggcattctggattatcagtgatctggattcctcattacatagcttgatggtgctgtcactgcccttctgcacagatttccaaattccacattttgtctatgaacttaatcaggtcatccgccttgccggttctgatacctttcttaatgacatggcgatgtattttgcagtagggccactgggtggagttcccctcgctgggatcctgtacttgtactgtaagatagttttctccatacgtgcaatctcatcagctcaggggaagtacaaggcattttccacctgtgcatctcatctctcagttgtctccttattttatggtaggagcctaggggtgtactttagttctgctcctacccaaaactctcactcaggtgctgcagcttcagtgatgtacactgtggtcacccccatgctgaaccccttcatctgcagtctgaggaataaagacataaagagagctctgaatcaattcatcagggtagtgccattcttcaggaagtgacagtgatcccagagctctaagccttggactgagaaattgtgatttgtgaaccagattctggaagtaggacttgtctcttctatttattagctggagtttcaatttctttgattgccactattctatagaatttacacttttctgtggaaaactgctccttgatatccaacagtgttttgttttgtttgttttgttttgtttttgtcattttcctacttttccaaagttattcccaaactaaggtcagaaacaaagtggagattcctattagtctcatagagttgtgagctgtgttagcccaaagaataaattacacttggcaactataaagtcattaatgtaatctttttctttttttttgagacagtttcgctcttgtcacccaggttggagtgcaatggtgccaccttggctcactgcaacccccacctcccaggttcaagcaattcttctgcctcagtctccggagtagctggattcaggtgcctgccatcacgcccggctaattttttgtacttttagtagagacggggtttcaccatgttgaccaggctggtctcaaactcctgacctcagagatccgcccgccttggcctcccaaagtgctgggattacaggcatgagccactgcacccagcctcattcatgtaattttattgtagataaatatctgagaccacagtttttcttttctgagtccaccattctttgctctatcactacttgactgctctacttgacaatgtaaaccttaacacattagtgtgtttacagctcatcgtggcatttcattcttctcattaggatcctgtgctctattcagcccagtgtccatggtgcctaccacactccctgggcaggaatagaacaaaaattgcaggctgggtgcagtggctcacgcctgtaatcctagcactttgggaggccaaggtgggtggatcacaaggtcaggagttcaagacctgcctggccaacatggtgaaaccccgtctctactaaaaatacaaaacttagccaggtgtggtggcgggtgcctgtagtccccgctacttgggaggctgaggtacttatacctgactcttacatgggtccacagccttggtccttgatatggtttggctgtgtccccacccaaatctcaccttgaattgtaataatccccatgtgtcatcaagagtggggccaggtggggataattgaaccatgggggcggtttcccccatactgttctcatggtagtgaataaatctcatgagatctgacggttttataaatgagagttcccttgcacaagctctcttgcttgctgccatgtaagatgtgactttgctttttattcgccttccgccatgattgtgaggcctccccagccatgtgggactgtaagtccattaaacctctttcctttataaattacccagtctcaggtatgtctttattagcagtgtgagaatagactaatacatcgtgttaagtgttcttaacaccaaaacaaaacaagaaaaagacacaggatactctgggaaatgatggattgtatttttcgtagagacagggtttcaccatgttggtcaggcttgtcttgaacttccgacctcaagtgatccacccgcctcagcctcccaaagtcccaggtttacaggcgtgagccaccgtgggcctaataaatggtttataaatgaaggacgaggacagctcttgacttgtgtcacaagcggatctcctcattttttcatcaaaagtgttatgaagccaaggagtacggtatctatgattttatatcaaaggaatatagttctctcccttgttgaagaaaacaataacagttttctggaggtatcaggggtgagggctgtgcccaccatgtcaatgctttggaagtccaagaaacctagtcagggaaggttcttcagtttttgagttttggggaaactttctctcagggttgggacaaggtgatgggaggttagacctctggaaagcagaagagttcatggagaaggaataataaagactagatgcgcctgactctttttattttattttattttattttactttaagttctgggatacatgtgcagagcatgcagtttggttacataggtatacatgtgccatgtcgtttgctgcccctatcaacccatcatctaggttttaagccccgaatgcattaggtatttgtcctaatgctctcccttcccttgtcccccaccccctgacaggccccagtgtgtgatgttcccctccctgtgtctatgtgttctcatgatgcacctaacttttaacttggactcttgaaggcaaagaatctgcaagaaaagtttcctttctgtgcaaagcaatgtcccacaggaaaatgatgtgctgggggtctgaataataagctatgtgcccaacaagcagatacagagagctataaatatcactgttgtccctcagcgtgtacaaccttgggctggaagggacacatgtgattatttattctggagtgctaggtctacctcagggaccagtgcttgactccttcctgctgtcttgtctggcgacagagtttcagtctccaccatcaaccattcagagaagaatttgaattcccacacagagactttcctctgagagatcccatccaggtgagtcggagagcccagtagctacttcagaaaagcttcagagagaatagaaacagagaatatttacccgaggtcacttgagagtcagttcagcctagtccagagcccagagattgcagtggggtttttttttttttttttgcttgtctgcttaattaattcaggttttcgtttatgacgctaaaaagagacatgaacattgacctcagcaatatactgctcgctgttgatatttaagtgatggaagcataatgagaagaggaaactgtaggcatagagtggttccagtagaagcagaacaaatgtccacgaatctctacaattttcggaagcagacaaatagggtattggctcgggagggatacacactgatgtgagcgcattctctctttttttttttttttgagaaggaatctggctctgtcgcccaggctggagtgcagtggggagatctcggctcactgcaacctccacttcccaggttcaagcgattctcctacctcagcctcctgagtagctgagactacaggcgcctgccaccacgcccagctaattttttgtattttagtagagacgggtttcaccgtgttagccaggatggtcttgaactcctgaccttgtgatctgcctgcctcgacctcccaaagtgctgggattacaggcatgagccaccgtgcctggactcttttgtttttaagatggagtatatttgagcatgcttccacactggtgagaaagatccagaccagtggattgtttgctaatgctaccttacaacagtagttcatgaggcatacgttttgcagtagtctcccttcatgctaggtagtcagatggaaaaagtatacattggataggtggaaatgggtgcactaatgagctttatttgcgattatttcttcactgctgagtctgaatatatttgtgggtttgttagacatttactttctcaattgcaaattgtctgtgtgagtgctttgctttcgtggagtgggtttgtttgcagtgtctttatttctgtttttgattgcattctttcaaacataagaactggagttttaggccaggcagggtggctaatgcccataatcccagcactttgggaggctgaggtgggcagattgctggagctcaggagtacgagaccagcctgggcaacgtagtgaaatcccatttctacaaaaataaacacaaaaattagccaggcatggtggcatgcacgtgcaatcccagctactgggaggctaaggtgggaggatggcttgagcccaggaggcagaggttgcagtgagctgagatcatgccactgcactccagcctgggcgacagagccagaccttatctcacaaaacaataaaaggaattggagttaaggtggggtatatttgagtatataccaccacctttgctgtttaacatttggttatgttatgtacatatagatgtactgcatattttatgtacgtatagacgcatctatacatgtgtagatatatgaaagtttgtaagttttgtgtgatcaaatctatctgtcatactgtgttcccctgattgcttttataaacatacaaagttcttctgcatcatttgagtaaataaatggcctttaatacgtttccaatttatttttgtctgtgttatttgtaattgcacctttgtccttttgtcgttcaatctatttctacaagtcacactgtctttgaccatcatttggaaggcattcttcttcttcatttgactaaagatcacctttatcttttataaacatatttgatccatgtttctttacgtaagataaaactataaatttagatatctgtcgctcaattatacagtatattctcttgtgactaggtctgtgttttgttttgttttgtttgttttcttttttgagacagagtctcgttctgttacccaagctggagtgcagtggcatgatcttggctcactgcaacctccgtctcccaggttcaagcgattctcctgtctcagcctcccaagcagctgggattacaggcatgcgccaccacgcctgtctaatttttgtattttttggtagagacggggtttctccatgttggccaggctagtcttgaactcctgatctcaagtgatgcttctgccttggtctcccaaagtgctggaattagaggcatgagccaccacacccagccttgtcctggtgttttatgtttgtactttaataaattggctccaaagatgtcccatgaattgaaatgcatctcctgtttattttcatatgctgccttgtgttctgacctctgtattctgagtcatcttttggaatatattgagtctagatccctttattcttaaaaggaatatttctacctcagttgtatgttatattctcttatgcgtaggtctttgcgactatatttatccacattgaaatcattaaattactgctatttcgtgtctcgtttcggttcattactgatgcttcttttgattttatttaatatattgttattttgaaaccactatatttaaactgattttattctcttgccattcttttcatctcattacttctcattttcttaaaacgtgtttctatacgatgcacatgtattcacatacatttgtgaaaacacaaaagtgaacaaagcaagttaagtccccactcatttatatttggcatgagaatggtgaagacagaatacaatgaaataaatgtgtgtatgacacgatgtcctcagggattaattgcatgaagaaggcatttcagtgtaaaaggacttgtcacagtgtgcacagaattttacgtaataatatcagcgaagcctttgcatgttgcaaaaagaccagaaccagaactagagcgtgcccgtgggattgtaaataaagagatcaaaatccaaaacccccaaaaaaatagcaaagaatagattgccggccggcgcagtggctcatgcctataatcccagcactttgggaggtcgaggcgggtggatcacttgaggtcaagagtttgaaaccagcctgaccaacgtggcgaaactccatctctgctaaaaatacaaaattagctgagcgtgctggcaggcgcctgtaatcccggctactcaggaggctgaggcaggagaatcacttgaacccgggagatggaggttgcagtgagccgagacggcgccattgcactccagcctgggcaacaagagtgaaactctgagaaaaggtgcccacctcttcatcttctgtcggaccatataaaaaccaattttccaaatcaatatgaaataggctacaggaaaaacaagttttttactgtttcatatattaaaaatgcccaaatttggttgttcttggttgagctgttggtttatttcctttgcccattctttccatgggtatgttcaatctctaagtgtcttgaccccaaaaagatttcatgacttctatcttttggacagatttgttttttatattctattattttggctgagtatcaaggagacatattgggagctggagtatggctgtaaccaaggaaacttttctcttttttctttttcttaattttttttttttttttatttccatgggttactggggaacaggtggtgtttggttacatgagtaagttctttttttttatgagtaagttctttagtggtgatttgtgagattttggtgcacccatcacccaagcagtatacactgcacataatttgtagtcttttatccctcacccccttcccaccctttcctcctgagtccccaaagtccattgagtcattcttatgcctttgcatcctcataacttagctcctacttatgagtgagaacatacaatgtttggttttccattcctgagttacttcacttagaataattgtctccagctgggcgcagtggcgcatgcctgtaatcccagcactttgggaggctgaggcgggcagatcaccttcggtcaggagttcgagaccagcctggtcaacagggtgaaaccccatctctactaaaactataaaaattagccgggcgtggtggcaggtgcctgtaatcccagctactcaggaggctaagacatgagaatcacttgaacgtgggaggtggaggttgcagtgagctgagatcatgccattgcactccagcctgggggaaaagagggagactttgtctcaaaaaaaaaaaaaagaataattgtctccaatctcatccaggtcactgcgaatgccattaattcattcaagcaagctatttcttcttcctagtctcccaggaattatctgaggttattagattttccccccttgggttttatttaattatcctctgtatgtttatcaagcaaaattgttgtatttttataattttttatgtttttttaaacagaagacagaacatgaccatacaaaaaaatggaaagataatctgatattgaaagcttgcttcatttccattcctctctaatattaatggtgtgactggaggtgagaacagcttgctataaacacagtcccaggagtcctcattcagcttcaagtgtgtgcctgtgtgtgtgtctgtactaattgtgcatatgtgtgtctgtctttagtggggagagtgatttcaaaataacatcattaaacagaattgaaaggagccttgctaattaactgaaacaagatatgaagtagcaataatttaatgttttcaacatggataaataattaaagttgcaaagacctaggcataaaagaatatgacatacaaatgaggtagagatatcccttttaagagtagagggacgcagtggctcacgcctgtagtcccagtactttgggaggccgaggcaggcagatcacgaggtcaggagatcgagaccatcccggctaacatggtgaaaccctgcctctactaaaaatgcaaaaaaattagccgggcgtggtggcgggcgcctgtagtcccagctacttgggaggctgagtcaggagaatggtgtgaacctgggaggcggaagttgcagtgagccgagatcgcgccactgaactccagcctgggcaacagagcgagactccgtctcaaaaaaaaaaaaaaaaaaaaaaaaagtaaagggacctggactcaatatattccaaaaggtgactcagaatacagaggtcagcacgcaaggcagcatatggaaataaacaaaggatgcatttcaattcatgggacatggagccaatttattaaagtgcaaatagaaaacatcaggacaagcctgggcgtggtggctcacgcctgtaatcccagcactttgggaggccgagacaaaaggatcacttgaggtcaggagtttgagaccagcctggccaacatggtgaagccccatctctaccaaaaaatataaatcttagcagggcatggtagcaggcacctgtagtctcagctacttgggaggctgaggcaggagaatctcttgaacccaggaggtggaggttgcagtgaacccacatcatgccactgcactccagcctggccgacagagtgagactctgtctcaaaaccaaaccaaaccaaacaaaatctgggcagagggacttcttgtattttgaagcttcagcagcaatgaagtcacctcatagtgcaacatcttctgacaccatctcccatcacttacctctcacagatttccctgccacactggcttcctcgttggccttgaacatctgaaaccttcctctacacctttgcaccggccattctttctgctgggcacacacattcccagatatcctcatggctcccgccctgtcttccttgaggtctcatttctctttttaaaaatttcagcttttcttacagattaaagggtacatgtgcaggtttgttacacgggtaaattgtgtgatgctgaggcttcgggtcctaacaatcccatcactcaggaggtaagcataggacccaacagatggttcttcagctcacatccccctccctccatcctctgtccagcggtctccagtgtcaattgttcccatctttgtgttcacgtatattcgatgtttagctaccatttataagtgagaacatgcgatatttggttttctgttcttgcattaggtcgctcagaataacggcctctagcttcatccatgtagctggaaaggacatgatttcattcttttttatggctgcctagtattccatggtgtataagtaccacagtttctttgtccaatccactattgatgggcacctatcaccttgactgctagtattctctggacacctaggaaaattaacatcctctatccaccctcgcctttttaccttctttctttttcttgctagccctggttaccatctgacacagtatatgatttacttgtattcttctccatacttcactgtaggaacttttgtttttcagcactgttcactcattgtctagacagagcctggaacgttgacaacactcaatttaaattcctcaaatccatgaaagaatttatcattaaagtattggtttttgttttgttttgttttgttttgtttgagatggagttttgctcttgtagcccaggctggatggagtgcaatggcgccatcttggctccctgcaacctctgcctctcaggttcaaatgattctcctgcctcaacctcccgagtagctgggattacgggcacgcaccaccacatccggctaactttgtatttttagtagagatgggttttctccatgttggtcaggctggtcttgaactcccgacctcaggtgacccgcccacctctgcctcccaaagtgctgggattacaggtgtgagccaccgcacccggcaaagtttttaaataaatgaccatttggggaaaagttgagcatcatgggaaaggaattcctaagcagagatgggatgggagatctcataaagtagaccagattcacacacaaaatatagaaattaacttgctgactgtaggatataaataatagcttttctgatgggtgaaaaaagcatgcttatgtcatgtattttctctctctctcttttttttttttttatagtcacctctaccacatggaaccagagaatgatacacgaatttcagaatttcgacttctgggattttcagaagaacccagactgcaacgatttctctttggtaaaaggcaaaagatttatacaatttgaagagaaaccagagcataacgatttctctttggagtgttcttatccatgtacctcatcattgtatttggaaacttgcttatcatcctggttatcattttatgctcccacctccacacctccatgtacttctttctctccaacctgtcctttgtagacatctgttttgcctccaccagggtcccaaagatgctggtgaatatccaggcacagagcaaagtcatcacctctgcaggctgcatcacccagatgtactttttcatacattttgtaggattggacagcttcctcctgactgtgatggcctatgaccggtttgtggccatctgtcaccccctgtactacacggtcatcatgaaccctcaactctgtggattgctggttctggtatcctggatcacaagtgtcttgcattccttattacatagcttaatggtgctgcagttgtccttatgcagagagttggaaatcccccactttttctgtgaacttaatcaggtcatccaccttgcctgttctgacacctttcttaatgacatggtgatgtatctggcagctgtgctgctgggtggggggatgtctcgctgggatcctttactcttactctaagatagtttcctccatatgtgcaatctcatcagctcaagggaagtataaggcattttccacctgtccgtctcacctctcagttgtctccttgttttactgtacaagcctaggagtgtaccttagctcggctgcatcccacaactcacactcaggtgcaatagcctcagtgaggtacactgtggtcacccccatgctgaaccccttcatctacagcctgaggaataaggacataaagagggctctgaagaattctttgggagggaaactagaaaagggccagttgtcctagggctgaagctatatccatgattgcaaggctcaaagcctcagagccagatattgctgttgtttaatcagatcatggaagtggaaactgctcttttttttttttttttttttttttgagacagagttttgctctgctgcccaggccagagtgcagtggcgccatctccgctcactgcaagctccacctcctgggttcatgctattctgctgcctcagcctcccgagtagctgggactacaggcacccaccaccgcacccggctaatttcttgtattttcagtagagacggggtttcactatgttagccaggatggtcttgatctcctgacctcgtgatccaaccgcctctgcctcccaaagtgctgggattacaggcgtgagccactgcgccgggctggaaattgctctatttatttcctgaagtttccatttcttttatctcaactgcttcatcaaatttaagcaactcctattattaagctttcctctctctctaatattcaacagattttccccttgttttcctcctttctcaaagttattcccaaccttgggtcagaaacaatttggagattcccatttgcctcatagggtgatgagttgtactattcctatggaataaactacgcttggcactgaggccatttatgtaattttattggagaagaatttctgaggctatggtttttcactttttgtgtttgtcattcatttctgtatcactaccttaattgatcttcctgataatgtagacttaaacatactagggtattttatagctggttatgggatttttcactcccattaggatcctgttctcttcttgaactcagtattcatgaattctactatatttactggcactgagtacttagtcaaaagttgctcatcaaataaatgctccaagcatagtctacacagaaagacaaactggcaaaaatcaattggctttacatggacttagagttagagatgacgttaaatatgatagagtaacattttcaattatgtactaaatttctatggaaggtttgttttcaatgatgtacatctactcattgaagtgtggaagcttgttattcatgtgtaatgaggtttgttgatctgagtgaaagatttggtgtcatggtctatattattttattgtatcatcttgctgtttctatttgaaaattctagtgttacctacaaatatgactacttacattgtccaaaaaatatttccccctttaacaaatgtaatcataacacaaaatacagatgattgaacaatatgtgtatttacttgatcatcaattcctttacatcttttataatctaaattcttttcagtcctcatgatcaaagattattctgttgatatctggatatttatatctttcctgaaagttggaaagttttcagttatttttttgataagctttctgtctctttgttcattccttctctttcttgattcctgttaattcaaatatttaccctccttatgctgccccataaaatcccataagttttcttcactcctttttattctgtttttctcctctgagtgtatgttttctaataatctgtcttcaagttcatagattatttcttctgctttatttcttctgctttatcaatcctgctgttgacactctagattgcatttttcatttcattcattgtatttttcatcttgagaatttctagagtttttttataatttcaatctctctgttaaatttcaaattttgttcatttattgtctttctgattttggtgaattgtttctctgtattttcttaaagtttgctgcacttccttaaaacaattatttttgaattctttgtcagaaagttcatatatctccatttctttctttttatttaaaatatataaataaatatataattgttttttaaaaaaattaaaaatcacaatacaacaataaaaataatacaaatttttaaataaagtataacaactatttacagagcatttacactgtgttcagtattataagtactctagaaatgatttaaagtatacaggagaatgtgcatagctaatatgcaaatactatgccattttatataagggacttcagcatcagtggattttgttatatgcagggtgtcctgaaaccaatcccctgcaaataaggaatgacttactataaagaagaaaagtgagaggttcgcccaggaataaggcactgaccagatgaatgtttcatcacttgaacacatgagcattgtaaaccctatagtaggtcttcccatctggtgagaaagatctcatcttgttgattattccttcaggcagaaaattgtcactcagaggggatgctgtgtctcactattcttattttctggaactgttttaatggtattttatttgggctttaaaaatcagtcctagccatgcatagtggctcatgcctaaaatgtcagcattttgggaggttgaggcaggaggatcacttgagcccaggttgttcccagaccaaagcaagggtcaggctgcttattctcatggcccattaatgagatgcagatgaactagggaggaaaagagtttttatttctgtaactggttacagggagaaggcctggaaattaccactggatcaactcaaaaattacaaagtcttccagagtttatataccttctaagctatatgtctatgtgtaagtgtgcattcatctaaatacataagtgattaacttcttttaatctataactaagatctgagtcctgaagaccttcctctggagcctcagtaaattcacttaatctaaatgggtccaggtgctggggtgattacccttatcttgtctcctgctaaatcatggaggtttagggagttccttcagacccccaacaaacttgtttgtggaggcctggggagtttcttcagacccccaataaaacttgtttaatcctaaatgggtcctgttaagaattccttcattatcttctcacgtttcagggcccaggaaaggcctaggcaaagctctgggtagccttttttttttacattccagcctttgtataaaggcactggccctatcagtttttaatatttaacttaaccactcagtcagtgctgaaacagttgttagagaggtctgctttagtaggacctagcctgctacaaggtgtttgagaccagcctggccaacatagcaagaccccatctctaccaaaaaaaaaaaatgaaaaaaaaattagtcctttgtgaattgttaaagacggtctatattctctggaatggaataacaagcagcatccaatggacttgttttgaacctgtaaaagtgtagatacctgcagggtcctgcctggacagccaggcaaaccacctctcatcttctcttcgcgtacctggaactttctctatattgcaccttcaatagtaagaatagaacttgtggcaaagtcattggaatggttttgttcagagttgtgtgtggtccctgtccacaactccaagttaagttgctcaggactcaaaggtctttttaaaaaacaaaaaaacaaaacctgcctgctcgtgcgcaaagaaactccatctaaaatgttgaggccaggcgcggtggctctcacctgtaatcccagcactttgaggggctgaggccagtggatcgcttgacgtcaggagtttgagaccagcctggccaacgtggcaaaaccccgtctctactgaaaatacaaaaattagcctggcatggtggtgggtgcctgtagtcctagctactcgggaggccgaggcaggataattgcttgaacccgggaggcggaggttgcagtgagccgggattgtgccactgcactccagcctgagcgacagagcaagactctgtctcaaaaataaatagataaaaataaaaaaataaaatgttgaggaaaccatcactggggaggacaataaacaatggaagccacatcaggcagaaaagagtatcataagcaaagagccccagagtaagggattcccatacctggtatccaagatgctcccaagaatacaaaactagcagaaaaaagtgtttctattttggctccctcactcatgggaatgaaattgcttagagaatagagttagaacggagtgattaatttaatgagcattcatgagaattcaacctctaagtctgatagtaaatatgccccttacacctgttacttactgctcaaatgttccaggaagcagggagttcgactttcagaggacttatgcccaaggccacatctccgtccatccctgaagctgagttgaacctccatcacccagggaagaaaggacctagggaactagaggctcagcaatgccctggagcatctgaggtggggaacaggtatggaggcaggcagagctctcaaaggaagaactttggcggtgtaaatggggacagtgtggtgaggacagtccattcacttaaagcatcctgcacaatgaattcctgtgtctctcttagctcttcctcttagctccctctcaggtgtcttcctctctcttccaggaccaaattctgaggctctttcgccttcctaataaaaattgacgtgttagcttctagtatctctcaaaagtttcttacccagccatcttagctgtttttctggagccatttaaagtgcttccaagaaataaaataagaaaaacaaaaaagaaaaagaaaaaataataaaaatgcttccattctcctgtatcaaagatgctcctatgttgtttacccataatatcttactcagttactcattcattcattcacttaagaaacattccctgagatttcatagttagcactcgcaagcccattgcatacatcttctgacattagtttacttaatatttctgtgtctcagtctccatatctgtaaaatgagtataatagtcatatccatttcatggggttaagatgagaattaaattagatctaccctatgatccactaatcccactgctgcgtatatattcaaaagaaaggaaatccatatatcgtttttgtttttggttgttggttttttggttttgggtttttggttttttgagacggagttttgctctgtcaccccagctggagtgaagtggcgtgatctcagctcactgcagcccccacctcccaggttcaagtgatcctcttgcctcagcctcctgagtagctgggattgcaggcacccgccaccacacccagctgatttttgtatttttagtagagatgggctttctccatgttggccaggcttgtcttgaactactgacctcaggtgatccacccacctcgtcttcccaaagtgctgagattacaggtgtgagccaccatgcccagcctggaaatctgtatatcaaagaaatatctgtacttccatgtttattgcagtgctattcacaatatccgagatatggaatcaacctaagtgttcatcactagatgaatggataaagaaaatgtggtacctaaacgaaggaatactattcagaatgaaatcctgccagttgctgcaacagggatgagactgggggtcattatgctaagtgaaataagccaggcacagaaagacaaatattgcatattctcactcatatgtgagagctaaaacatgttgatctcatggaggtagaatgtagaatgatagttatcagagagtgggaagggtgtggggtgatgaggtgagattgactcatgggcataaaaacacagttagaaggaatactttctagtgtttgacagcacagtaggggtctatagttaacaataatttattgtatatttcaaaatagcaagaagagatttgaaatgttcccaacacaaataaatgataaatgtttgaggtgatggatatgctaattactctgctgtgatcattatatattgtatgcatatatcaaaatagcccatgtaccccataagtatatacaattattatgtatcaattttttaaataactataataaatattttaaattaaaatgaggattaaattggctgggcgcggtggctcacgcctgtaatcccatcactttgggaggccgaggcaggcggatcacgagttccagagatcgtgaccatcctggctaacatggtgaaaccccgtctctactaaaaatacacagaaaattagccgggcatggtggcgggcgcctgtagtcccagctacacgggaggctgaggcaggagaacggcatgaacctgggaggaggagcttacggtgagcggagattgggccactgcactccagcctgggcaacaaagcgagactccatctcaaaaaaaaaaaaaaaaaggattaaattaaagatcatgcataattttttaatagtctccaagatctagtgaacacctactcatgttaattattattagtgcattattataaacacattttcattcattaaatcaaaaaaattgtgatgatggtcaaatgaactaagacatataaaatatttgacaagtgcttgacatgcaaaagtccttaatagattttagctattattacttttatttgttgagtatttacaagtttccagtccctgttccaggaattttatattcttggatttttttaaatttctttttaacttttaagttcaagggtacatgtgcagttttgttatataggtaaatgtgtgtcatgagggtttgttgtacagattatgtcatcacccaggtgttaagcctagtacccattagttattcttcctgatccactccctcctcccctactccaccctccaataggccccagtgtgtgttgtttccctctgtgtgcccatgtgttctcatcatttagctcccacttataagtgagaacatgtgatatttggttttctgttcctgtgttagtttgctaaggataatggcccccagctccatccatgtccctgcaaaggacatggtcttgttttttgctatggctgcctagtattccatggtgtatatgtgccacattttctttatccagtctatcattgatgggtatttaggttgattccatgtctttgctattgtgaatagtgttgcaatgaacatactcatgcatgtgtctttataaaagaaggatttatattcctttgggtatatacgcagtaatgggattgctggaccaaatggtatttctatctttaaatctttgaggaataaccacactgacttccacagtggttgaactaatttacactcccttcaacagtgtataagctgttcccttttctccacaacctcaccagcatccatgcttgttaatgtttgaaatgatggagatgtatttttaagagattcaactgtacatatgaatgctacttttatttttccttggactcaattttttgttaatttttatttttgaataatttggatttacagagtagttacaaagagagtacagagttcccataattcccttacctattcctatgggaactaggtaaaagcaatggttgaaaaacattctgaatgtccctctgaatgccaccttagaatggctactgctttttacagatttgttttgtttcagctgccttattaaaatcatgctcagttaaaataagttttcaggctgggtgtggtggctcacgcctgtaataccagcactttgggaggctgaggtgggcggatcacaaggtcagcagttcaagaccagcctgaccaacatagtgaaaccccatccctactaaaaatacaaaaattagctgggcgtgttggcgtgcacctgtaatctcagctactcaggaggctgaggcaggagaatcacttgaacccaggaggtggaggttgcagtgagccgagatcatgccactgcactccagcctgggagaagagcaaggctctgtctcaaaaagagaaaaaaagaaaaaaaaaagaataagttttcagctaccaatccatcatccacagccaatccatcatccacagccaatccatcatccacagccaatccatcatccgaaaacaaagttatgttgcctttttaatataggtctcatttctttttctccttgtattgcattggttgaaacttccagggcactgacaaataattactaataataaacatacttttcctttttaattcttaaaggagaattctcctgttgttcctgccacacagcctcaccagggcatttttggaagtaagttctgtttatttaattccttccttagttattgatctgttttcctccatcccgaatcaactttgggcacttatgtttttccagaaataaattcatttcttggggattttcacatttttaacatggcgttataaatgacattatcttgcaaagttgagtgtttccttatctctgtgttcatttttttctcattcttggttttaggcctttctgctctttctccctctttgtatcccttttgttacacttctaattttttctattcgtttgtggttgccaaagaattcgctctggaatttatttttcagttccagaatatttcttctttttagttcattaattctgctttgatctttattagctactcctttctgttttaacagaatgttaaatattttgtgataatttttaacaaaatcaaattttacaatattgattttataacacttgtattgacaatatcttcaaatttttaagtttttatttcttgaggataggctacacatgtattcatttgcaattttcaaacaatatgctaaaaaaggaatctaaaaatcaaaattaatgttaacactcaaagatgatccctcttcatactttggggtatgttgttatggatcttttttttcttttggtgccaatatgtgtatagtttaagagatccataggctgagttcatttctctagctcagaaaaggagaccaaatgtcttttcatagcagtatctgaaatgttttctttccacatgatggaatttttttttccccctagatggagtctcactctgtcgccagactagattggagtacagtggcgcgatctcggctcactgcaacctccgcctcctgtgttcaagccattctctctcagccttccgagtagctgggagtagctgggattacaggcacgtgcaaccatgcccagctaatttttgtattttcagtagagacggagtttcaccatattggccaggatggtctcgatctcttgacgtcgtgatccgcccgccttggcctcccaaagtgctgggattacaggcatgagccaccgcccccaaccgaaattttgcattcttactcttctttcatacagacattttaattccctcagtgaaaggggtatgttattgttaattttacttttttagattaacagtaaaaataaaacattttctcaaacatttattatccttttacagttcattttatgaacctttaatattctatttattttccccatcagtgcattaatatttcaatgatttataattgtctttataaagatattaacttttgtcagttacataaattttttttttgcattctaactttctgcaaggcacattttctcattcagaatttttcaatttatggttctagttgctgatctctttttctatcaaaggtgaattattcagaaagaatttgtactttcaaagattatatctatccatgtataaatttatataatctatatgtttatctatgttttcttcagatagcttatgtagtctcttgtctgtttgaaatgtatttgggactacagagatgggatttgacattattttttctaaataattaatcattaaacacttatttatacctttaaaaaacactatttaaaataactaaaggaggccagggaagatggctcacacctgtaatcccagcactttgggagcctgaggtgggtggatcacctgagatcaggagttcaagaccagcctgaccaacatggtgaaaccccgtctctactaaaaatacaaaattagccaggaatggtggcacatgcctataatcccagctacttgggaggctgaggcaggagaatcgcttgaacccgggaggcggaggttgcagtgagccaagatggtgccattgcacttcagcctaggcaacaagagtgaaacttcatcttaaaaaaaaaaaaaaaaaaaaaccacaaaacaaacaaacaaaaaactaaaggattataattggattgcttgtaacacaaaggataaatgtttgagaggatggatgccccattctccatgatgtgattcttatgcattgcatgcctgtatcaaaacatctcatgtaccccataaatacatacacctattacgtacccacaaaaattaataataagttttaaaaagagaaataataaataagacctagtatttgctagcacaacagggtgagtacagtcaaaatcaatttaattgcacattttaaaataacaaaaagaatataatttgattgtttgcaacacagaggataaatgcttgagggaatggatgctgcattttccatgatgtgattactatacgcattgcatgcctgaatcaaaatatgtcatgtaactcatagagatatacacttacccacacaacttaaaaaaataaaaaaaaaattttaaacacactcaagtatccagaaataaaaaatgcaagttaacgtgataaaaattacacattctaaatcacagtgaacatcatattaaattacaaaactctagggttattctatttaaaaaagaagaagaaaaagaagaatgccaactcctaccataaattttaaaaggattctaaaatttcaaaccaatgcaataagacctaaaagagaaataggtgttattaattagtattatttggagaaaatagatgaattttagagaaaaacatgaaactaagaagaaaacccagaaaaagaatatggcacctcttcaatacaaaaaaagcaaatgacttcctaatataataccaatagcagagatgttatgtgggggggtattacattaaaatattaagaaattaacataatctatatgtgtatttttaacacgtgaacaaaaatgtctacccaaaaaaggattaaaatatgcagaggaacatttctgctactggaatgagaatttgaacataataaagatgtcaatttctctccaaattaattgataactttaatgtaatctccaataaaattccaatggtatttttcttgcaacatggctagaggattctaaagctcatctgggaggataaactggcacatcagaaataaaattatgaaagaaacaatactaagcaaatttctcaactcaatgtttaagtatattttgaagatagacaattaaaaatatggaacaaaagatttgataccctgcttgctgtcatggcacagatgaccatttaaaattatctatttataagagtgtgaacaagaaaatgtcttaatgtttttgttgttgttgttgttgttgttttttgagacagagtctcgctttgttgcccaggctggagtgcagtggcgtgatctcggctcactgcaacctccgcctcctgggttcaagcaattcttctgcctcagcctccctagtagctgggactacaggtgtgtgccaccacgcccagctaatttttgtatttttattagagacggagtttcaccatgttggccaggcttatctcgaactcctgacctcgtgatccgcccaccttggcctccgaaagtgctgggattacaggcgtgagccaccgcgcccggccggaaatgtcttaattaaaaaaaaaaacaacaacaactgagaaaggccatttacagattaacctaagagaagaaaatataaaaaatataaaactatagttaatcaaaaactttctttgtctttaagaaaacttagaaagtaagtaaatgtccaacatggacaagttttaaagagccatttctgtatggcagaatattttgatctgatggaatcagatgatggaaaatggggataaaatttaattctatatctagaaactctagggcttttctatttcaaagttccatttttgttgagtttagctagggagattgataatataaatgaaatgtaaacaatgatgattaaaaacagtggttattattttttagcagaaggggcatccaagatccagaggatttaacatgtagacattacaactgggcacagtggcttgcacctgtaatcccagctacttgggaggctgaggcaggaggatcacttgagcccagaagttcgagactgcagtgagctaggatggcgccactgcactccagcctgggcaacagagccagaccttgtctctaaaacaaaatgaaaaataaattacaggaatgcagcacaatagaagaaaaagccttctgaggattgacaatctgcctagaattagggaattctcattgcctgatttcctaatccccatgccttaggcagaaagggcaagagcagccaccagggatgctgcggtgggaaggattgcttagggatacaggcaagcgctgaagcaatagtcctcaaacttgagtgtgcatcagaattccctagagggcttgttaaaacccagaatgcaggccaggcacggtggctcatgcctgtaataccagcactttgggaggctgaggcgggcggatcatctgaggtcaggagtttgagaccagtctggccaacatggagaaaccgtgtctctcctaaaaatacaaaaaaaaaaaaaaattacctcagcgtggtggtgcgcgcctgtagtgccagctactcaggaggctgaggcatgagaattgcttgaacctgggagccagaggttgcagtgagctgagattgcaccactgcactccagcctgggcaacagggtgagactctgtctcaaaaaaaaaaaattaattaattaaaattaaaaggccaggcgtggtggctcatgcctgtaatcccagcactttgggaggccaacgcaggaggatcacgaggtcaggagttcgagaccagcctgaccaacatggtgaaaccctgtctctactaaaactacaaaaattagctgggcgtggtggtacatgcctgtaataccagctactctggaggctgaggcaggagaatcacttgaacccgggaggcagaggttgcagtgagccaagactctgccactgcactctagcctgggcgaaagagcgagactccatctcaaacaaaaactaaaccagaatgctggctccatacccagagtatcagattcagtcggtcaggtgggcatgataaggcacatgtctaatgagttcccaggtgatgctgatggggctgttccaggaaccacagtttaaggaccaatgatgtagagatgacttctccaggtagcgatggtaactgtaacttgtcggcaaagaaatccaataattagccaaaatgcatgatttcttgagttccctgggtttgaataaaggatattgcagtcattctggggaatgcttatttggagtaaattttgtgtggctgttttttttcctccttctcggcaaacccagcggccccatggaaagaggaaaccaaacagaagttggaaactttctcctcctgggattcgcagaggactctgacatgcagcttctcctccatgggctgttcctctccatgtacctggttaccatcatcggaaacctgctcatcatcctgaccatcagttcagactcccacctccacacccccatgtacttcttcctctccaacctgtcctttgctgacatctgtttcacatccacgactgtcccaaagatgctggtgaatatccaaacacaaagcaaaatgatcacttttgcaggctgcctcactcagatattttttttcattgcatttggatgcctggacaatttgctcctgaccatgacggcctatgaccgcttcgtggccatctgttaccccctgcactacacggtcatcatgaacccccggctctgtggactgctggttctggggtcctggtgcatcagtgtcatgggttccttgcttgagaccttgaccattttgaggctgtccttctgcacaaatatggaaattccgcactttttttgtgatccttccgaagtcctgaagctggcctgttctgacaccttcatcaataacatcgtgatgtattttgtgaccattgtcctgggtgtttttcctctctgtggaatcctattctcttattctcagattttctcctccgtcctaagagtatctgccagaggccagcacaaagccttttccacctgtggttcccacctctcagtggtcagcttgttctatggcactggccttggggtctatctcagttctgcagttacaccaccttctaggacaagtctggcagcctcggtgatgtacaccatggtcacccccatgctgaaccccttcatctacagcctgaggaacaaggacatgaaggggtcactggggagactcctcctcagggcaacgtctctcaaagaggggaccattgctaagctctcatgaattgcagtgaacacaatactgaggccagactggcctctttcagccaatatttcaacttctgtttttatgcatttttttgagacggagtcttgctctgtcgcccaggctggagtgcaatggcgtgatctcggctcactgcaacctccgcctcccaggttcaagcaattctcctgcctcagcctccttagcagctgggattacaggcatgcgccccaattcccggccaattgtttttatttttagtagagatggggtgtcaccatgttagtcaggctggtctcgaactcctgacctcatgatccacctgcctcggcctcccaaagtgctgggattacaggcatgagccaccgtgcccagccacttctttttttttttttcaagaaggagtctcactctgtcacccaggctgcagtgcaatggtgcgatctcggctcactgcaactgccgcctcccgggttcaagtggttctcctgcctcagcctcctgagtagctgggattacaggcacccgccaccatgcccagctagtttttgtatttttagtagagatggggttttgccatgttagtcaggctggtctggaactcctgacctcaggtaatctgcccgccttggcctcccaaagtgctgggattacaggcaatgagccaccgcaccctgccttcttttatacatattaaagcatctcttcccttgcatcttcctttggaacgtttcctgcccttgctactgctaataaagttatataggatcaccctttttgactttctaaccagtaatcttaactttgtatgaatacaacctggtgttttctctgttatctttagtaatgatttggattttgttttttgtttttgttttttgttttgttttttgtttttgtttgtgtttttgagacagtctccctctgtcgccctggctggagtgcagtggcgccatctcagctcactgcaacctccacctcccgggttgaagcaattcccctgcctcagccttctgagtagctggaactacaggcatgcaccaccatgtctggctaatttttgtatttttaatagagacagagtttcaccatgttggctaggctggtctcgaacttctgacctcaagtgatctgcctgcctcagcttcccaaagtgctgggattacaggcatgagccactatgcccggcctgatttgagttaaaaatatatgtatcaaatcttacatgttaaatatataccctcagaagcgatgagatatgtccctattttggacttgttgccctggaaactcatttacagagatgttttttgaggttacgtgaataaaaataactcaaagagtttcctcctttttttatctgattcactttcctttcagtcacaccaactttacttaacttttctactctttcacaatatgggttccttgaatttcagagcaatgtctcaccgatttttgcaatcacaatgcctagcacagttattggtaaggagttcatgtttacatgatatctgtcaaatggagtagaaaaatagatgggtggatggttaaatataaaataagatctggaccagaaaaatacaaattgattaatctgatgagaggttttggccaggcatggtgctgcatgcctgtagtttcagctactcaggaagctgaggcgggaggatggcttgaacccaggaggttaaggctgtagtgagctgtgattatgccactgtactccagcctgggtgacagagtgagactctgtttctaaataataataataattaattaagttgttgagctagaaacaaaattcaaggttattgatgttgatattaataacactttatataccagcacagtttaagagctttatatacattacctcatttaatttttccaataactcttttatgtgattagtattatttctcaaatttacaaataaaaacgtaagagcttatggtaagtaggtaattagctcaaagtaatgaatgtagcgacaaggttcaaatgcagggctgtatgaatcagacagctctcccaggcattatgttgtgttgctgtggagtcctaattagggaaaaggagtcaggctggcaagaccaagggaaagcaaaaagaagcagatagaagtctgcctttcttcatggtcccagacacaaagccctcctgtgcaaaacactcacaatcttcctgcactcagctatcaccagaccctcagctgatacaaaaattgcaagttagctcagtgcaaccttggcgttatcaatactgtacaaagccctcctcagcacacagcacaagcactgtcttataaaatccccagcaagcttttgtccttagcaatcaactcctccattgctggcctgcccattgcttccttgcaatgtattttcatactttctccaataaatctgcctttctttacctacaactgtgttggtaaattcttcttatcttccacaccaccagccccagacagtcgccactcacccatgacagttacctctagtcaaaccttctaataatatagttaaacctcaaaggaaccaggaattctctgacataaattcttacttctggaattatgctccccaaccaagaaatattctgtgtctgggggctgcagcctcagaaataaatgaaacccaagagtaagatttattttttcctttgatattttaatttgacttcctttgattgttcattaaaatgagcacatttttgtgctcgatcttttggtgttcgatgtttttatagtaactcttttttccagctttactgaggaataattgactaataaacattgtacttattcaaggtgtataatgatttgatatatgtatacattgtgtagtgatttacttgcattaatttttactaaattttgagtttacctccattgatctaatcttagactttttaaaattctagttcacttagtttttaaatttttattcttaatcattatggatacacaatagctgtacatatttatggggtacacataaattttttttttttttttttttttttgaggcagagtcttgctctgtcgcccaggctggagtgcagtggcgcaatctcggctcactgcaagctccgcctcccgggttcacgccattctcctgcctcagcctcctgagtagctgggactacaggcacccaccaccacgcccagctaactttttgtatttttagtagaaacggggtttcactgtgttagccaggatgttctcgatctcctgacctcgtgatccgcccgcctcagcctcccaaagtgctaggattacaggcgtgagccaccgcgcccagccacatatgaaatttttacacatacaatatatactgatcaaatcaatgtaattggggtatctatcgcttcaagtatttatcatttctttgcgttattaacattccaattccacttttttagttattttgaaatatacgataaattattgttaactatagtcaccctgttgtgctaccaaatactagattttgttccttctaactgtagttttgtagtcattaactatcccttctttatcctccctccctccttactgcccctcctagcttctggtaaccatcattctactctgtttccatgagttcagttttttttagctcccacatacaagtgagaacatgtaatgtgtttttctgtgcctggcttatttcttttgttgttgttgtttgggttttgcttttttttttttgagacggacttttgctcttggcacccaggttagagtgcaatggtgcgatctcggctcactgcaacccccacctcccgggttcaagccattctatctgcctcagcctcccgagtagctgggattacaggcagccaccaccacgtccggctaatttttttatttttcgtagagaccaggtttcatcatattgaccaggctggtcttgaactcctgacctcaggtgatctgcccgcctctgcctcccaaagtgctgggattataggcgtgagccaccaagcccggccgcctagcttatttcatttaacatcatatcctccagctccacccatgttgttgtaaatgataggatctctcattaatttttatgactgaatagtgctccattgtgtatatgtaacacattttctttatccattcatctgttgatgaacacttagttggattccaaatcttagctattgtgaatagtgctgaaacaaacatgagagtgtataaaagacatctcttttatgtatgtatttattaaatatttccacagctttccattcatcttttattatctttattgttttacttgcagctgtttaatatgtttgagtccatcagttatcttctcagttctcttcttttctctttcttccatctggatttctgctcagagggttaatctatctttttttctagaattctgctgctatttgacatttttcctccaacttcattctattatggtggttgatgttaagataggaatttaagttgattttgctccccaattaataaccaattatccaagtaccatttttaacgtccttccttccctcaatcaaaaaattgattttttttctttttccttttcttttttttttttttttttttttttttgaggtggagtttcactcttgtcacccaggctggaatgcaatggcgcaatctcagctcactgcaacttctgcctcccgggttcaagtgattctcctgcctcagcctcccaagtagctgggattacaggcgcccgccaccacactcagctaattgttgtatttttagtaaagacggggtttcaccatgttggccaggctggtctctaactcctgacctcgggtgatccacccgcctcagcctcccaaaaagtgctgggattataggcgagagccaccacggccggccccctcattgattttaatgtcacttctataatatagtagcttattttactgaatttgtttttcattatccagcagcattggtatacagtcatgccccacatgatgatgttttggcctaagacagaccacatatattatggtaaacccataagattataatggagctgaaaattttcttttctttttttttttttcttttttcgagacagagtcttgctctgtcgcccaggctggagtgcagtggcacaatctcagctcactgcaacctccgcctcctgggttcaagcaattgtctttcctcagcctccggaatagctgggattacagatgcccaccaccatgcttggctaatttttgtattctgagtagagacgaggtttcaccgtgttggccaggctgctctccaactcttgacctcatgatccacctgccttggcctcccaaagtgctgggattacaggtgtgagccactgcgcctggcccggagctgaaaattttctacagcctaatgacttcatagtcactgtacttcagaatgcaacacattactcacacgtttgtgtcaacaaatctactgttccacctgctgtataaaaggcaagcacatacaattatgtatatagtgcagaatacttgacaatgaaaataaacgactatgttactgatgtgtgtacttactatattatacttttttatcactattttaaaggttactccttctacttattaaaagaaaaagttaaccataaaacagcctcaagcatgtccttcagaagatattctaaaagaaggcattgttaatacaggagatggcaactccgtgcgtggtattgcccctgaagaccttccagtgggacaagatgtgaaggtagaagacagtaatactgatgatcctgaccctgtgtaggcctaggataatgcgtatgttacaaattttttaaacagaaaaaaaaaaccatatagaataagaatataaagaaaaaacatttttgtacagctgtacaatttatttaagctacccgttattacaaaacagtccaaaagtggttttttattgttgttgttgttctgtttgatttatttatctttttttttgagatggggtctggctctgtagctcaggcaggagtgcagtggcgcaatctcagcccactgcaacctccacctcctgggttcaagcgattcttcctgtctcagcctcctgagtagctgggattacaggtggccaccaccacacccggctcatttttgtattttcagtagagacagggtttcaccatgttggccaggctggtctcgaactcctgacctcaggtgatccgcccgtaatcccagcactttgggaggccagggctgcggatcacttgaggtcaggagtttgagaccagcctgaccaacatggcaaaactcccgtctctactacaaatacaaaaattagccaggcgtggtggtgggcacctataatctcagctactctggagactgaggcaggagaattgcttgaacctgagaggtgaaggttgcagtgagccgagatcttgccactgtactcaagcctgggtgacagaaagagactctgtctgaaaaaaaaaaaatatatatatatatatatatatacatatatatatatatatatatacacgtgtgtgtatatatatatacacgtgtgtatatatatacgtgtatatatagtgtatatatatatgtgtgtgtgtatatatacgtgtgtatatatatacgtgtatatatatacttgtgtgtgtgtgtgtgtgtgtgtatatatatatatatatctcattactgggagatataattgctttctactgaactgaaaacggccctgcgaggggcatttctactgaactgaaaactcacatctggtctctcctggactctgtcccatgcacctttgcttttgctgattttaatctttacccttcactgtaataaaccataactgtgagtatgatagcttttctgagttctacgagtctttttattttattttattattattattattttttgagactggtttcaaactcctggactcaagcaatcctcctgccttggcctctgaaagtgctgggattgtaggtgtgaatcaccacgcctgtcttgaattctatgagtctttccttttttttgaaacagagtctcactctgttaccaggctggagtgcagtggcgccaatctcagctcactgcaacctccgcctcccgggttcaagtgattctcctgcctcagcctcctgagtagctgagactacaggcgcctgccaccacgcctggctaattttttgtattttagtagagactgggtttccccatgttggccaggctggtctcgatctcctgacctcatgatctgcccgcctcagccttccaaagtgctgggattacaggcgggagccaccacgcccaaccctgaattctatgggcctttctagtgaattgctgaacctaaaggtggtcttgggggacccctgacacagagaccatggatattgttttatcaggagaaataatggtttttctttaccttcttcttccgccactctttgagaatgtgagaaacatgagttgaccactcttcttgttgaagctgaagcttcccttctccccaaacctaggagaaacgtttcttcccctcccttgctcacgccgtccttcaagccctcagcatatgctcagagagaaacagagaccttatatacctttcattcctgctcctttatttcacttttccctcccccctaaatgagtcaagcagaacgtgtgttcagcccacggtcagttgggcaacagatgtgtcaccaggactcccctccccagcccccttccctcctctctgggggggcagagctggaggcccctcacatagcactctcgttgcctccccgtccccgggatgcccccttctcctgtgccatgagggacttgtagggtttccccaggctggggagggtaagctcagcttcctgaagctccagctcccgctgagacaagtgctcgatgacggccgctccaattgagtcccccagtacgttggtcattgtgcgaagccggtcactggtacaggggagaaagaagctgccattaatgggggcttgaaaagcttcacagaaagagggtgcagcagaggggggtccctgtgccagggagtcagagggctcccattgcagtacaatccatgaccacatgtccccaagcaggttcttccccctctctgccctgtttctcctactaacaaacaggatggaccaggtctgagatgttcatgtttgatcttagatgtgatattttttaaaaaatgaggctgggtgtggtttacagaaaaaagatcatatcattaaaaagatatgatcccagcactttgggaggctgacaggcagaagaattgcttgagaccaggagttcaagaccagcctgggcaacatagcaagaccccgtctctacatagaataactttaaaacacagcctgggatggtagcatgtgcctgtagtcccagctacttgggaggctgagatggcagggtcacttgagcccagaacgtcaaggctgcagtgagctatgatcatgccactccactccagcctagatgacagaacaagaccctgtctctcaaaaaaaaagaaaatgaggcagggcgtggtggctcatgcttataatcccagcacaaggcgggcggatcacaaggtcaggagttggagaccggcctgaccaacatagtgaaaccctgtctctactaaaaatacaaaaaaaaaaaaaaaaaaaaaattagctgggcatggtggcatgcccagtagtaatcccagctactcgggaggctgaggcaggagaatcacttgaacctgggaggcagaggttgcagtgagctgagatcgagccactgcactccagcttgggtgacagagcaagactctgtctcacaaaaaaaaaaaaaaaaaaaaaaaaagaaagaaaagaaaaaaatgaacatctcatgcagacgattaagggttatgaactgaaaagcacatagaatccggaatggtaaaccagggcaggcctgagtcaatacaggtgtagactagggcaggctgaagattataaaattggaactcaggctcagctgacagctcccatgtgggaatgaaagtccaggcttcctttaatgtaaacctcctggttttgttgttgttgctggtttttgtttttgtttttgttttttgagatggtgtttcactcctgttgcccaggctggagtgcagtggtgcgatctcggctcactgcaacctccacctcccaggttcaagcgattctcctgtctcagcctcctgagtagctgagattataggcgcccaccactaggcccggctaatttttgatatttttagtagagatggggtttcaccatgttggccaggctggtcttgaactcctgacctcaggtgatctgcccacctcggcctcccaaagtgctgggattacaggcgtgagccaccacacccggcctgtttttgtgtttttgaaacagagtgttgctctgtcacacaggctggagtacagtcatgtgatcttgactcactgcagcctcaacctcccaggttcaagagttcctcccacctcagcctcccaagcagctgggactacaggtgcgccaccacacccagctaatttttgtattttttgtagagatgggacttgccatgttgcccaggctggtcttgaactcctgaactcaagcaatccacctgctttggcctcgcaaagtgctggaattacaggcacatgtcactgtgtcctacccgtaaacctcctgtttttaaaaattgagatttaaatatatatttgcagctgggagtagcagctcacatctgtagtcccaactacttgggaggctgaagcaagaggattgcttaagctaaggagttcaaggccagcctgggcaacacagcaaaacataatctcaaaaaaaaaaaaaataacaaatcccagcactttgggaggctgaggcaggtggatcacgaggtcaggagatcgagaccatcctggctaacatggtgaaaccccatctctactgaaaatacaaaaaaccaaaaaattagccaggcatggtggcgggcgcctgtaatcccagctacttgggaggctgaggcaggagaatggcgtgaacccaggaggcaatctcatctcactgctacctccacctcccaggttcaagcgattctcccacctcagcctcctgagcagctgggattacaggcacgtgccaccacgcccagctaattttgttttttgtttgtttgtatttttagtagagacaccgcacccggcctggatcaccttttggtgacttctacataaaacaggtaaaagaggagtttttctgcctgataggtaaagcccccattgcttgtctccaaccctacttcccaaagataactgtgggatttggggtccagaggccatggattggaggcctctccaaggcctccttttcacttgaaaattctggaccactgcatctttgctggaataaaagtccacaggtcgaggacgttgcaggggaaagcagtgtgtgcagaagcaggagcaccagggtccagcctagagaacactcacaggaaccagtccacggcaatgatgagcgtgatgtcttccgtgggcaagccgaccgacgtaagcacaatgaccatggtgaccagacccgcctgggggatgccagcagccccaacactggctgctgtggccgtgatgctgcagggggagggagaacatggggagcagatggagggaagaaggcgatgaggaagagagaggaaaaggacagagagaagggaagagatcagctccccaaggcattttaaattaaatacccaagccagacacagagagaaaaatactgcttgatgcctcgcctcgcctcgcctcacctcgatccccacccaccccgcccctcccctcctcgcctcaccttgcccctgcctcgcctcctctctctctctcccaggctgaagtgcagtggtgttatctcagctcactgcaactcactactcaatcccaccttaacctcctgagtagctgggaccacaggcacatgccacaacgcctggttaatttttagtagagatggggtttcaccatgttggccaggctggtctcgaactcctgaccacctcgaactcctgatccacccacctcggcctcccaaagtgccagaattacaggtgtgagccaccgcgcctgacagagcttacattctagtatgggaagcaggcaataaacaaaatgaataactaaaattcatactatatggagatagtactacacggggaaacagtgcctccttagcaagacccgatatgccattttaaacagggcttccctgaaaaagtaacgctgaagacctgaaggagatgacaatgttcactgttatttttataatgactaagttggaaccactggatgatgggacctataaatacaggaataaataaatgtatagagcctacaaatataagaatctatatacaagaacctcgggttatcaggatgcaccagccatgctttggaaaacactggacaaatggatctcccacgtgagagggaaactgacaggaacgtcttggcagctcctgacagcctcaggtggcaactttacctttcacctacctcatccggcattgggctcttcccacatcccgcttccaacatccgtgggctcctctgagctccagctgaggccccctcctccctccccaaccctcccagccaagctgatgaccgcttaagtctcacctgctggcaggtcctacccaagccccctcacctgatggttgtgatctgacccaggttgagctcgtagttgttaacttgagcaatgaagatggcagccagggcctcgtagagggcagtgccatccatgttgaccgtggcgcccacgggcaggacgaacctggtgatgcggcggtccacacccaggccctcctccaggcagcggaaggtgatgggcagcgttgccgagctgggggaaagagcccaggactgaggatggggcgtggcctggtgggggcggggctgggaacagggtgtggcctagtggggcagggcagagaatggggcgtggccgaagaaaggctggggaacagggcgtgacctagtggggtacggctgagaatgggtagggctgggtcacatgggcggggctgagaacaggggaggagtaggtgaggcggggctcagagcaggacgtggccaggtgaggaagagctgagaatagggcgtggcaaggcagggcggggctcagagcagggcatgggctgggcgtggcctgggcagaaatgagcccaaggagcgttccccttgagaacattgagcaggccaggtggggggctcctcaagatgcagaagacaagggtataacatttcagaggctgataactgtacaaaggaaaggagcaactcctcatgatacaggaagaaaacagcaatgagggtctcccaagctgaagatctcttcacccacttaaagccaatagctaaggccaatgactacacactagtttatggcagtagttcgttctacctatccatttccaaaaaggacaggaccaaaggtctgctgacttcagggagggcccctactccagactcccctgtttgcaccagcattgacctcagctgtgctaactttctctatccatctacccgccatgtcttatcggagaaaagtgacctaattgattggcgagtttagtcaaagaagtgggcatctcatttggggtaagtctgtccacaaggcgtgtgttctgtggtcagctttacatcatacggttggaatcctggactcataagagagtctctgggtgtccagctcagcggtgactatgtgagtttaattctaggatacagtgacatcagtcttacctagccatagaccaagaggcacattccctgaccagcgttatgggcaattttaaaaattatatttttgatcaggtgcagtggttcgtgcctgtaatcacagcactttgggagagcgagacgggcagatcacttgagctcaggagttcaagacaagccatagccaacatggcaaaaccccgtctctaccaaaaacaacaacaacaacaaaaaaaacttagccgggagggctaaaaaattagccgggaggactggaatcaggcacctgtgattccagctacttgggaggctgaggtgggaggatcacttgagcctgggaagtggaggttgcagtgagtggagatcacaccactgcactctagcctgggtgatagagtgaggcctcatgtcaaacgaaaaagaaaaagaaaaaaaagatatttttggccgggcgtggcggcttacacatgtaatcccagcactttgagaggccaaggtgggcagatcacatgaggccaggtgttcgagaccagcctggctaacatggcaaaaccccatctctactaaaaatacaaaaattagccaggtgtggtggtgcatgcctgtagtcccagctacttgggaggctgaggcaggagaatcacttgaacctaagaggcggagcttgcagtgagccaggattacaccactgcactccagcctgggtgacagagtgagactctgtctcaaaaaaaagaaaaaaaaaattcttccatctttttggctgttgtgctacttttcaaatttgtttttgaattgggatgatgctcttaattaatcccctaaaactacaaaagaagaagaggaggaggaagaggaggaagaagaaaaaggaggaagaggatgaaggggaagaagaaggaggaggagaaggaagaagcagcagccaagagatctcccagacaccatctcacaagtggagatgacaccctctgagctaggaaatgactgagctcatggggcatcctggaaccttccctcttaacctcaaaactggtacctggttctcctccacagaaagttaaaaaacaggaaaggagaaaaggagaccaggagagccagcccaggacaatgactggaccccaggtgttgacattatgagccctggacattgttggacgactcagaagaggtgtttaaggaatggagagggcaggtgccttaggagaggacatgaaggacaagaagtgcaaccaggaatggtgctggggtggggagcaaggccatacctggaagacgtgcccatagcggtgatgagggcttgtagcatgcccccaatgaaggggaaggggttccggtgagtgacgaggaagtagatgaggggaaggacaatgccggcatggaggaacaggcccacgatgacggtcagggtgtacatgcccagctgaccccccaggacggccatgtcttccatctccagaatcttcccagcaatcaggaacaggatgcccacaggtgcatacctgtgtgagggagccacatacctgtcagggctccctcctgacctcccttgcaggtctgaaggtggcatccccaaggctttgcccatatagggccctggagccacacaatacccatgatacggcaccctactccatcccagtcttccccgtacactaatgaatgccaccgggccccatgaatgaagcccacctcctcctcctcctgctcttccacatctccccaccatggtagaaaagttcctacaactccaggatatacaagctttcaggtctctcctgtacctactccccattcaagctctctcaatcctgccccaaataatcactaccttcagtttccttccttagacattgccaagacattccctgtctctggccttctaagcttcccttatcttctgcccccaactgtttgttccacatttgaaatgtgtatgcccctattctcttccctatcagtgcctgttatcactcattcaccagcctaagcatttccctctcaaaccacttgtcctatcaaaatcaccgatgtattcattcattccacagatattgactgagtacctactgagtaccaggcacatggctctcgtcctcaaagcacttacattctgttatggactaaatgtttatgtcccctccccactccaaccaaattcatatcttgagatcctaacccccaatgggatagtattgggaggtgattaggtcatgagggtagagccatcatgaatggaattagtgcccatataaaagacacaccagagagctccctccacccttctgtcattcgaagacacagcaagaagacgccttccatgaaccagaagacagccctcaccagacatggaatctgtgggtgccttgaacttagacttcccaccctccagagctgtgcgaaatacatttttgttctttaagccacaatgtctatggtatttttgttacagcagctgacatgaactaagacacattctaatggggaaagcaggaggtacacatagaaatgcactaattgcaaacttcaagtggtgataacagcaaaggagagtcactggatgggactgcttctgagcagatggtcagagagggcttttctgaagaggtgacatttaagctgagacttgcatgatgagaaggtaccctgtgtatctggaagaaatcattgcaggcacaatgcagactctgagatgggcatgcactaggagtgctggaggaccagagagaagaccaatgtggctggagtattgagtaaaaaggagaatagagaagatgaaagaagcaagttcatcaggggctcacctgtttccccccataatccagcccacgggtcaatcgagtgagtttctgccattggcaccatcatctcatttcgaggcttcaatggctactcctctttctttagaaattgaagtttatggctgggcatggtggctcatgcctgtaatcccagcactttgggaggccgaggagggcagatcacttgaggtcaggagttcgagaccagcctggccaacatggtgaaatcccatctctattaaaaataaaaaaattagtcaggtgtggtagtgcacacctgtagtcccagctactcgggaggctgaggcagaagaatcacttgaacccaggaggcagaggttgcagtgagctgagatcacatcactgcactccagcttgggcgacagagccagactgcatctcaaaaaaaaaaaaaaatttgaaatctactttggctcacattcatcgtggatgtgttggaggaggtggggacctcttgggaaggtggtacaatagcttgagtcaaaaatgaggatgcacggggcttctccagtcacatctgtgttctccaaactgggctcagagttagccctggggagtagttgctgagtcttctccaagtcaacatgactagatccacctctatgcttactctgagtaatccctctctcaacttcctcacctccatccttccacctcatcccctgcaaaattcctcagcccaagattaattgtgcatgatttcttaccccctacactcagccacctggcacatctggacatttcacccaatcatgccaatgacactgctataaattcattgttcccaattcagctgagccttcattattccttgttaactctctgcttatccttaataagctccccactcccattcctttcagatgcttttccaggccctcaacttggcctcaagttccttatatgaagaaagtaaaagttcgtcttcaaagtttcccttcttgttaaagaataaatcttaagtgttaaaaatagtttcttttaaagactaacttccttcaagcctccttactttatgctaataactctttgttaagccctatcctatgtaggtgttagacacgctcacaggcacatagtacattctacgtccttgtactttaaccaagatatctgtgctggatgtgctcacaggcatgtcccagcttgcagcctataccccttccttatttgggaatgttattacttttctaagtccttttgtaagcaacttcctcttttcctctgttttccattgcttttacctatttagaaaagttttaaattattagccagtcgggatttagtttagattgtaaagtctggctccagccaatggagacagacacagtagcagggacaaactgcataagggataaaaattgcttcttccctcctttgttcaggtgtgctcttgccattgttccatctgtgatgaacaccctttctgcagaagtaaaaattgccttgctgagataattaaatttatgtttgagtgctatttctttatggcactggggaacaagcattctgtttctaaataaacattttacatatgacactatacaactttccaattgtttgggatgatgtacaaagtcttctcccatttgggatctgacagccttgttaatatcttccaccaccactcccaacttaccccatgctctcaccttcctgaatgccccaccattctccaaacaacttaggtaccttcaagctttgcatgttctcttctctctgcctgaaatacgtctcccctctcactgtccagttgaagtcctactcacctgtcaagacgcagttaacaggtgaccttcttcatgactccctcttcaggaagcattcactgcgtacccctctactcactgcttccttctccaagttcccaacattttttaaatgttcctttactacagaacctaccaccttgtgttatattgatctacaatgtgtctgtctcccctaagattttgtgagcttgttgaggacaaggtatgagtgcactgtatctctgtactccagaggtcaagacaaagtctgcctgggaaaatgcctgctgagtgaataaagatatttctgaagtaataaaggaatctagagaaggaatgatggaaggaaggaaggaaggaagggattaacaactggatgaataagtaaggaaataagcaaatgaaacaagttagtagctgagtgaacaaatacgtgaacaaatgagtgaatgaagagaatacttgaataaatgaatgaaagaataacaaatgcatagatgaatgagtgagtccaagaatgaattagaatgaataaatgacttaactgagtaaataaacagatgaatccatcaatgatttaactaatgcatggatgagtttgtaaataaatttacgagtgaatgaatacatgagtgagttaactgatgcatggaagaatgaatagatgaataagaaaatgaatgaaccgatagaaaaatgagaatgaataagtgaataaattggtgaatgaagagatacatggggaagtaaatgggtgaataaatcactgcagaaaggtatgaatgaatgaatagtaactaaccaatgcataggagatgaataaatccctgtcacttgtgacaacacagatgaacctggaggacattatgctaattgaaataaccaagacacagaaagacaaataccacatgatctcacttatctgtggaatctaaacaatcaaactcacagaagcagggagtaaaatggtggttaccagggactcgcaggaaagggagattggggagatgttgatcaagggtacaaaatttcagttaaataggagaaataagttcaagagatctattggacaacatggtaggtatagttaaaaacaatgtattgtgtacttgcaaatcacaaagagagtagattttaagtggtctctccctttttttttttttttgagactgggtctcattctgtcacccaggcaaccacaactcactgcagcctctacatcccaggctcaatctgtcctcccgcctcagcctcccaagcagctgggactacagctgcatgccaccacacccagctaattttttttgtattttttgtggtcttgtcatgttgcccaggctggtctcaaattcctgggctcaagtgattctcccaccttggcctcccaaagtgctgagattataggcatgagccaccacaccctgcctagatcttaagtgttctcaccacaaaaaaataagcatgtgaggtaacgtctatgttagttagctcaactgaaccattccacaatgtagagatatttcaaaacattatgttgcacatgaaaatatatacagtttttatttgtcaattaaaaatacattaattttgcaaaataaataaatgaatgaccaaataaatccagaaaccaatgcatgaaagaataaatgtagctgaataaatgtcagtgaatggcttggtcaatgtattgaagaatgagtgaatgaacagataagcaagggagtgaacaagtgaacaaatcattgcagaaaagtgtgaatgaatgaatgagttagtgagttggccagtgatttaaccaatgcatagatgaatgaataaatgcatgaggaaatgagtaaatcaatgcattgaagcatgagtatagatgaataaatcactgaatgagtgatttcatcaatgcatagaagaatgagtgaatgaacagatgaacaaagcagtgaatgaatcattgcagaaggacatgaatgaatgaaagagtgagatattccatgaactaaccaatgcatagaagaatgaatgaatgaacagatgaacaaggaagtcaactagtgatgaaatcatcccagaaagacatgaatgaatgagttggtgagtgggtaagtgaatcacccaatacgtaaatgaatgaccaaaagtccccagcaagcccttcggcagcttccccacagcctgacttcccagctctggctccaccatcccgtgggcacagaccaggactcaccagataatgatgcccaccagcctcataatagcctcattgaggctgtcgaagaagtccctgaggactctgcccttgtgtttcatgccaccaatgaccagcccaaaggccacagagaagaccacgaggcccagggcgttgatgccattggcggagccaggcacgggtacagtctcctcaaagctcagcatctcctgcagggtacccaaggcccgagtgacattttccaggaagctggttccgttctccactgagaatggaggaggcatggaggcacccggctcagacccgttctctgtcctcaccatggtcctggttaccaccctcgtgctgtactgcgtcttgaactgaaatagagagagattgcgcccagattcaattcagcggatgcattagaatcgcctggagaaattccttgagaccactgattcccagttcccacaccctggaagatcgataagatcttcattatcgattatcactcattatcgactatcactcattcagcagatctgaatgagtgaatgaatgacttgaatagtgcatggaagaatgagcgaatgaatcagtaaacccattatgaaaaatcatatggagcttcctcaaaaaattaaaaatagaactaccggccgggcatggctcacgcctgtaatcccagcactttggaaggtcgaggcaggcggatcatgaggtcaggagtttgagaccatcctggccaacatggtgaaaccctgtctctactaaaaatacaaaaattagctgggtgtggcagtgcgtgcctgtagtcccagccacttgggaggctgaggcaggagaatcgcttgaacctgggaggcggaggttgcagtgagctgagatggtgccactgcactccaacctggcgacagagtgagactccatctcaaaaaaacaaaaaaaaattgaactaccataggaccagcaatcccactactgtatatatccaaaggaaatgaaatcagtatctcaaagagatatctgctctcccatgtttattgcagtactattcacaatagccaagatatgaaatcaacctaagtatccatcagtgaatgaatggatacagaacatgtggtatacatatacaatgaaatactattcagccttgaaaaaggaggggatcctgtcatttgtgacaagagggttgaacctggaaaacactgtgctacgtgaaataaaccaggcacagaaagacaaatattgcatgctctcacttatatgtgaaatttaaaagagttggactcatagaagcagaaaatagaatagtgcttaccagggactggggagcagggaaattggggagatgttggtaaaaggacacaaaatttcagctagacaagagcaataagttcaagagctctattatacaacatggtgactatagctaataacaatgtattgtgtatttgaaaatcaccagaagggtagattttaagtgtctttatctcaaaaaatgttaagtatataaggtaattgatatgttaataagcttgattgagccactccacaatgcagacatatttcaaaacatcatcatacctcataaatacatataatctttgtgtgaatttgaacataaataaattaaaaatattttttgaagaataagtgcctgaataaatgaatgaggaagtgaacaaccaatgtgtggaagtagtatagattctgaatttttcacaagctccctgagcaatgcttaaccagagttgagggcctctcccctcaaccatctgtggtcaaaatttctggaatctctacaccagccttgttgcctcctctagccctgtgctcaggaagtccttggcctaagtcctcttttttttttttttctttttttgatatggggtcttgctctgtcacccatgttggagtgcagtggtgtgaccactggagccttgatctcctgggttcaagcaatcctcccacctcagcctcccaagtagctgagacaggcgtgtccagctaatttttttttaatctttttttttttttgaaagacagagagtctcattctgttgcccaggctggtcttgaacttttggcctcaagtgatcctcccaccttggcctccctaagtgctgggattacaagcctgatccaccattctcggacctaagtgcttctccctaacccccccagatcaccatggaaaatacatcctttctcctagactcctcaagaacccctgcccattgctctgtcaggcccttcctcccgcctcttgcccttggaccatcccttcagccccaagctcccaccaccctccgaatctccttgatcaaactgtgtacttccccctgacctgtttgaagcaggcctccacaaggtttggtggaaacatatttctgcagaaaaacatgagaagaaggaaagtggttagaccatggaagggcatctagggtgataacagtaatactaacaccaagaacaacaatagtgcagccaacatatgaatgcttcctctaggctgggcactgagcaagcatcttactatcatctgattaaaacactacaataaccctagacatgagtcctattgaatgccgcctttcacatagaaagaaaccacagcccagagaattgatgtaagctacccggagccacagagctgctaagaggtgcagatggccctcaaatccaggtctgtctgagcatgtggccagagccctacatcacctcaaggactttaattcaaacacacatgtgtcagtgatgcctcaaaaaaccacagaaaactcttaaacccttttaactttaggtttcgtctaggcccatgattaaggtagaaccatggctagccttgattctgtgtggcaaaaatcttgctgctttaattaaaattaaaaccacaatgagataaccaccttaaccccagctagaacagccatcattaaagagtcaaaaaactatagatgttggcattgatgtgggggaaaggggacacttacacactgctggtggggatgtaaattagtacaacctctatggaaaacagtatggagatttctttttttttttttttagatggagtcttgctctgtcgcccaggctggagtgcagtggtgcgatctcggctcactgcaacctccacctcccgggttcaagcaattctcctgcctcagcctcccaagtagctgggattaaagttgcccaccaccacgcctggctaattttttgtatttttagtagagacagggtttcaccatgttaggcaggatggtctcaatctcctgacctcatgatctgcctgcctcagcctcccaaagtactgggactacaggcgtgagccactgcgcctggctgagagatttcttaaagaactaaaagtagatctaccattccacctagcaatcccactactgggtatctactcaaaggaaaagaagtcactatatcaaaaagacacctgcacacatatgtttatcacagtacaattcacagttgcaaagaaatggaaccaacctaagtgcccatcaactgatgagtgcataaagaacacatgatatatgtacaccatggaatactactcagccatgaaaaagaatgaaataggctgggtgcagtggcttacacctgtaatcccagcactttggaaggctgagatgagtggatcactcgaggccaggagtttgagaccagcctggccaacatgatgaaacgctgtctctactaaaaatacaaaaattagctgggcatggtggcaggcacctctaatcccagctactcaggaggctgacacaggagaatcgcttgaacccgaaaggcagaggttgcagtgagctgagatcatgccactgcactccagcctgggcgacagagtgagactctgtttcaaaaaaaaaaaaaaaaagaaagaaataatgtctttggcatggttggagctgggggccattattctaagtgaagtaattcaggaatggaaaaccacatacagtatttctcacttataagtgggaactaagctatgagtatgcagaaacatacagagtgatataatggactttagaaactcagaagcgggaggcggggagagtagttagaaattaaaagctgcacattaggtacaatgtacactactagtgggacggatgcactaaaatctcagaattctccactatataattcatccatgtaacaaagaaacacttgctccccaaaagctattgaaattaaaaattaaaaaatttttcataggccgggcacagtggctcacgtctgtaatctcagcagtttaagaggctgaggcaggtagattacttgaggtcagcagttcaagaccagcctggccaacacggtgaaaccctgtctccactaaaaatacaaaaattagtccagtgtggtggcgtgcacctgtaattccagctactctggaggctgaggcacaacagaaccctggaggcggaggttgcagtgagccaagctcatgccactgcactccagcctgggcaatggagtgcaaaaataaaaataaaaacaattaaaagagtaaaggcaactattaatagcaaaaatattttttaataataaaaataaaaaatcaaaaatttagttaattttttaaaaaatcgtgctgcttctatttacaatagcaaagacttggaactgacccaaatgcccatcagtgatagactggataaagaaaatatggcacatatatgccatgcaaatactatgcagccataaaaaagaatgagttcatgtcctttgcagggacgtggatgaagctggaagccatcattctcagcaaactgacatagaaacagaaaactaaacactgcatgttctcactcataagtgggagttgaacaatgagaatacatggacacagggaagggaacatcacaccctggggccttttgggggctgtgggggcaaagggagggggagcattaggacaaatacctaatgcatgcggggcttaaaacctagatgacgggttgataggtgctgcaaaccaccatggcgcatgtatacttatgtaagaaacctgcacgttctgcacatgtatcccagaacttaaagtaaaaaataaaataaaatataaattaaaaaatcatgctgctctaagagaatcattcaccctccaatgatgcttaggcaaataccagctgttctgaccccaccttaagggtcatatcctaagatcatattctagcagcagctgctgttggagaatatatacaaggctccagggcagaaattgggtaccacaagtggatactatgggtgctgctatgtccaggctgcgggagcctgtcccctttgtctctccttcagtatgagttgttgcaagtagagtcagaaatcatatcaaaatgagtacagtcacctgtaaactaaaagtaacacctaagccaccaccaccaccaacagctgaacagactctcttgtggccaagtggaccccagaacaactttaaaactgagttcctggccatgatgggacaggaggtcagacacgcctccttacactctctcccttttataatctagacacaacaactaacccacattaatgttattaatgcattaaattaaaacagaaatcataagactgatagaacaggctctttggggcaataagataccaaattataaggaggatctaagaccatgccacgcaggggttaagtcatggaccctacgctcaaagaataaattgtgttctagctgtcaaaaggttcttctttttctctaggagttaaacaaacactagtcttatgataagcaatattaaaataattacaactcatcagctcacagacaaggactaatggggcccctgttccaccagccataactacagctttgattggacaagagactgatttcagtaactttctcctgataacaccactgaccatgggctggttctggctcattgacagaggctgtgcatttgggtaccttcgtgtcctgaaaagaccttttgatgtataaagcctaaatgtgatacatttaaatgttaagtaaatgttaagtatccaccccaaagtggacatggggtcatatgttacatgcaactttcttcaatatgcatgcatcagggccacctacatgaatattcatagctcctcctgtaacctgttgaatatgcatgtttagccaacccattcagcataaagctcctactccaacccctcctccttagaagtgcccgtctctgctcttgaccggacgcatgcttcccagcctgtgggatgacctctttgcaggctataatcttttacaataaataaagtctcctttttcaaatgtgtatattgtggttttttaggttggcacacctgatcaggtccatgaaggcatcagctgtggggatggtctcgatccggccctcccggtgcagcccctccttggagcccttcccgggatggatgatggtgaccatgaggatgccgatgaagaccgcgatgatggtggtcaccatgtagtacacagctgcccgcatccccatccgccccgtggccttgttgtccagggatgccatacctgaaggacagatgatgtggcccccgcagctccatgcatacccaacgccagctctcctagcatccgttccaccctccccatatcaccaactcaacagccgacccaccaagcatcccttttcctatagcccaccccaaaacccacccattacccattcacccgcaccaccatctttctacttctaattttccaaatacacaccctcacacgccatcccaacccttatcccaagcagcactccactatcctactgccttccctctactccaagccaccttttccacactttcaccccatcctctattgagtcttgttttctcttgttttgcaccataacctaactattttttttttgagacggactctccttcgcccagactggagtgcaatggtgcgatctcagctcagtacaacctccatctccccagttcaaacaattctgctgcctcagccttccgagtggctgggattacaggcacctgccaccatgcccagctaatttttgtatttttagtagagacggggtttcaccatgttggccaggctggtctcgaactcctgaactcagacgatccactcacctcagccttccaaagtgctgggattacaggcatgagccactgcgcctggcccataacctaactttcattccacttgtcatcccactattaatcccaaaatcacaccttcctccaacccacctcacggcgcaccctttgtggcacatattcttggtgctccactcctacaccctttcccaagccaatctgctgatccttcagccccgagagcactgagtacaatagctcaggctgcccacttctcctgagaattgccctcagcaaaatgggagctgccttgcccatagaaaccccaggggagacctagagccaaagaatgactgtgcagggattcacaatggccaactcctttgattcaggtggcagtagagctggggagggattcaattctgtggttctgctcacactccagagctccccatgagatgaggctgagaggccagccttcttttgaaacccacatctttgcttcactggtttcccagccctgtcccacttccttcacttccttgcgagtttctcttgagagctatcccgcaataaatcacctgtgcagatatccccatctcagtcaggctctgcttctaggaaacccaacctaagaagccatttcttcatgcctttttcttcttccccatccccaaatccagggattggcaaactgctactcatgccaaatccggccctctgcctgcttttgtaaataaagttttattggaacacaaccatgcccatttgttctcatattgtctatggctgcttctgtgctgcaatggcagaatcgagtacaattgacccttgaacagcatgggtttcaactgctcgagtacacttatgcatggagtttcttctgcctgtgccacccctgagacagcaagacaagccctcctcttcttcttcctcagcctactcaacatgaagacaaaggggatgaagatctttatgatgatccacttccactcaattaatagtagataacatttctcttccttatcatttttttaatagacagggtctcaccctgttgctcaggctagagtgcagtggtgccatcacagctcgctgcagcctcctgggttcaagtgatcctcctgcttcagcctctcgagtagctaggactatgggcatgtatcaccatatcctgctgattttttttattttatatagagatggagtctcactgtgttgcccaggctgatctcgaactcctgggctcaagcaattctcctgcctcaacctcccaaagcactgtgattacaggcataagtcacctcacctggcctgattttcttaataacattctattctctagcttactgtactttaagaatatagtataatggccgggcggggtggctcacacctgtaatcccagcactttgggaggccaaggcgggcggatcacgaggtcaggagatcgagaccatcctggctagcacggtgaaaccctgtctctactaaaaatacaaaaaattagccgggcatggtggcgggtgcctgtagttccagctactcaggaggctgaggcaggagaatggcatgaacccaggaggcggtgcttgcagtgagcggagattgtgccactgcactccagcctgggcaacggagcgacactctgtctcaaaaaaaaaaagaatatagtatataatacttacagcatacaaaatatgagttagtcaactgtttatgctctctgtaaggcttccagtcaatagtaggctattagtagttaagcttttcgggagtcaaaagttacatgtgagccgggcgtggtggctcatgcctgctatcccagcactttgggaggccgaggtgcgcagatcatgaggtcaggaaatcgatatcatcctgaccaatatggtgaaaccccaactctactaaaatacaaaaaattagctgggcgtgttggtgcgtgcctgtagtcccagctactcgggaggctgaagtggaggaattgcttgaacctgggaggtggagattgcagtgagccaagatggtgccactgcaccccagcctggtaacagagcaagattttgttaaaaacaaaagaaaacaaaacagttatatgtggattttttactgtgtgggggttggtgcccctaacacccaaattgttcaagggtcaaccctagttgcaaaagagaccatatggcccttgaagctgaaaatgtttactatccagccctctaaagcaaaagtttgtggacccctgcataagccaaccatactcccatcccaccctctacccactaagctgtcacctccatctcactcaccttccacaccttaatcgacaccccactccctgcacatccataccatagcccagccaccctccctggttgcccttccaagactttctctcacttctttgtgatactaagccccttgcaggctggcattttacctccaaggaaaaggacaggaagcctactgagatgagtggtgtggggtcatatggggtctggaacctgggaccgattgggacctgggctttgtttggccaaggacgctggaccagacacaggctccatgtttgaggtgccgcgtcaaggaagtggtcccatgcttgggatggccttggctctgggttcaagctgaggctctagacgggtcttggaggccaacactggcctgggctctctcacctgtgaccaggctggagacaatgagaggtaacaccagcatctgcagcatcctcatcagaagctctccaggaaaagagaagtacttgatctggcggtaggtgagctgatatgggcgcagggcaaaggccaggctgacccctagggccaaaagaaggggtccatggactgaagtctgggtcgctcagccccaggcagggtccatccatcccaagaagggtagggcaagggtgggagtgagggagagaaatatcctatgagtgtgtgtatttgtgtgtgcactgatgtgtgcagacattgtagaaatgtatgcatgtatgggttaccatattgatattgtgtaaatgtgtgtccgtgtctgtgcaaatgtaaatgtgtaaatgtgtgtgtatatatccaggatatgtgacggtagacattcacttgtgaacaggtataggtgtctgtatacaggggcatatacacatgaatctgcacaggtgttttcctggacatctataggtgtgatttgtgtgtatcttactattttcaaacatgggagtgtacgtgttcttaagctcataagtgtgtgcacgtgtactcaagagaatgcatgtagagatgtgaatgtgtttataagttccaacatacatgcacaagtgtgcatgtttgtgtttgcacctataagttcaatgcacgcatatgtgtgtgtgcatagtaaagtgtttgtacattgtatatgtatatatgtgagtgtgtgtgtacacatggatatgcatgtaacattgtgtgcacacacagttgtgtttgcacacatgtgtattcatctgtgtggtgtgtctttatgtggggggttgagggtgactggtgggactgggacgtgtgtgcaggtgagaatgaaggggtgcagcaaagagatgtgtagaggccaggaatttccctgaagtccccgcctttccctgaagtccccgccctccaagaggcagagctcaccaatgaccacggcgctgaccgtcagcagaatgaaggcgtttcggcgcaggaagcgcagcacgtgctcgagggtcatggtctgcaggcgcaggcgcgtgcgcagtgctctctgctgcaggctttcctgcagccgctgcagccagcccacccggcccagccgctggccgctctcccgcaggaacaggctgttgccatggctgctcatggtctatctgcgggaaacagagaagcctggggctggtgagggccaggacagaaggccggcgtgggcagatggcgaaggctgcgaagggtaatgagcgcttcctgaggactctcagaaggcgggggtggctgggtgttttggctcacgcctgtaatcccagcactttgggaggcagaggcaggagaatcacttgcgcccaggagttcaagactggcctgggcagctaggggtggtagtcctaaatatttgggaggctgaggcaggaggatcacttgagcccaagagttcaaggttacagtgatctatgatcttcccagcctgagcaagatagtgagacctccacccctccaaaaaagcacaaaggccaggcgcagtggcccacacctgtaatcccaacactttctaaggccaaggcaagaggatcgcttgagcccagaagtttgaggctgcagtgagctgtgactgcaccactgcactccagcctgagtgacagagcacagccctgtctctaagaacaacaagtaaataaaaatataactaaaaacaaaatggcaggggagggggaaggtaagtctgttgcgatgtgcccggttctaaggacaggtcttggcaggaaaacgtcaagtctccagaatcattcctgagaatggctgggaagaggaggaaaccacaaaaataatggacctttttgacacaccctgactccagcccactcttatttcactgagatcatcacaagcctctgggggctgccccagtggctcaagggaaattaacaagcctttgtgaagtgccagctgcatacggagccctagacaaagcacccggaggctagtcccccaaattaggacggttttgtgtccagcctggaggcttttcacaaggacaaaatcagcaggtgcctggcaaacagcaggtgcccagtaaatgcagctattctgcctgaatgcccaggtgagcaacagggagagcggggagtcaggagagcggggagtcccttgggaatgaaatgataatgattcttggccacagtgtgatgttcatgagcccctctggggtggcaggcactgtactgatgtttcccaaactgcaggcttttgcgtctcctctttatatttggccatatccatgtgtccttattcacttacctaaaaaacagtaccgaaccaggcgtggtggctcacgcctataatcccagcactttgggaggccgaagcgggcagatcacttgagctcaggagttcgagaccagcctggccaacacagtgaaacaccgcctctactaaaaatacaaaaattacccaggcgtggtggcaggtgcctgtagtcccaactactcgggaggctgaggcaagagaatcacttgaatccaggaggtggaggttgcagtgaaccgagatcgcaccacagcactccagcctggacgacagagtgagactctgtctcaaaataaaaataaataaatacttttaaaattaaaattaaaaatgtatctaaaatggaaactttagacccctacttgaaatgtgaattatatttttcatcaacattaaataaaatgcatataaaaattaaaacttgcccatctgtctaccaactaaacacctcacgtgtacagggcggctcagaaattgtgattttcatgggcctgaggaacttttctctttgtgcaccccttccttcattaaaaaaaagcctacattaaaattctatttcacaactgcattcatataaagaaaaatatgttatttcagaacgagatagaggtgacaattattgcacaacataatgaaaatactagatgctattgaattatatgttttcaaatggttgcttttgtgttatgtgaattcccctcaattttaaaaattgagccagctgctgtggctcatgcctgtaatcccagctacttgggtggctgagtggggaggatcacctgagcccaggagttcaagacctgagacagaatgtcgctctgtcaaccaggcaggagtgcagctcactgcagcctccaactcctgggctcaagtgatcctcccacctcagcctccaaaagtgctgggattgtaggcatgagacaccgcacccaccctaaaaaaattaaaaattaaaatgaatatgttaatattctacattataacattctttcacctaaatgcttgtttctgtcttctgattttgaaagagatgaaaacatcagggaaatagtagaattgtattagaggctgggaagggtaggcgggaggagaggatggggagaggttggttaacagatacaaaactacagctagatagaaagaatgagttctggtgttctgcagcaccgtagagggactatggttaatgatcatttattctatattttccaaaaagccagtagagaaggttctgagcattcacacattaagaaatgatcaatgtttgagatgatggatgtgctaattaccctgatttgatctttacgcattgtatgcatgtatcgaaatgtcactgtatcccatcaatatgtacaagtattttgtatcaactcaaaataaaagggaagcaaaaaaaatgaaaacggccagggcgcagtggctcacatctgtaatcccagcaatttggaaggccgaggtgggcagatcacttgaggtcaggagttcgagaccagcctggccaacatggcgaaaccccatctctatgaaaaatacaaaaattagctggatgtgtcacacgcctgtaatcccagctactccagaggctgaggcaggagaatcgctttgaacccaggaggcagaggttgcagtgagccaagattgcaccactgtactccagcctgggtgacaaagccagactttgtcaaaaaaaaaaaaaaaggaaaaaaaaaaaagaaagaaaggagggaagggaacggaagggaagggaaggggacaaagggaagggaagggaaggggacaaagggaagggaagggaagggaaggaaagggaagggaagggaagggaaggaaagggaagggggaagggaaggaaagggaaggggacttttctgtgggtccctaaaagcactgtgtgctataggtactatacctcctaacctacactgttctcataaccaagaaagggtggtgcccttcttccaggcatactgagaattctgttcttccttctagacccactcttaggctccctctcccatgggctccctttcgatctacccagtggaaaggacaacagtatggagatttctcaaagaactccatcccatccagaaacctccctactgaatatccaccccaaggaaaacaaatcattgtatcaaaaggatatctgcactggcatgtttcatcacagcaatattcgcaatcgcctagatatggaatcaacctaagtgtccaccaatggacgattaaagaaaatgtgatatagataagtttatcatattatagataaatagatctgtatcacatttatatcaatatcacattttcttgctacattgttgattacagtattttatctatgtttcattatgtatatcatggaatagtaatcagccataataaagtgtcttttacagcaacacacatacaactggaggccattctcttaagtgcaataattcagaagcaaagtgtaataccacatgtttacttatttttagtatttttgtatttttagtagagacggggtttcactgttggccaggctggtctcgaactcctgacctcaggtgattcacccacctcggcctcccaaagtgctgggattacaggtatgagccacagcgcccggctgccccccatctacttcctaagggatcaaggctccctgatattttttctcacccgcaccccagccacacccccagtacctgaattcaaccaggtcgagctgcaggtttcttggaggtctcagttttaccagtacgtaggtccctggcctttgtgttttgctgccactggcttttctgggatcttccttgccctcctcaactccccaccatatccaagggatgggaaatctgccctgattttccagatcctgcgtcctctagagctaatccaaattcccaatgccaagccccacttaggatcctgctccaaatggacccatctcctgaaaccacaatgctgcttctccttgctgtgaaaaaaaaaaaaaaaaaaaatcccaaagagtgaaccacagactacacagggaatccctctgggatattatgtttccagtccctaagccacagcaggaagttgcctgtagataccaagggagatcattcagctaagatctgaacagtcaggaaaactcccgaggctagagttttgtccggttcctttctcttccttacaagacataatacggtattgacaaactatggtctgctagtcaaattcagcctactgcttgtttttgtaaataaagttttattggcacacagccacactcatgcattacctattgtctacagctgctttcaagctacaatgcctgagttgagttgttgggacagagattgtacgggccacaaagctcaaaatgtttactcttgggccatttgctgaaaaaatttgctgacccctggagaagagcagacagcacttagcatctgtgggccagacgcagtggctcatgcctgcaatcccaacactttgggaggtgaaggctggagaaccgcttgagcccaggagttcatggccagcctgggcaacatagccagaccctgtctcttttttaaaaattaaaaattagccaggcacggtggcctgtgcctgtagtcctagccactcaagaggctaaagcaggaggatcgcttgaacccaggagtttgaggctgcaatgagctatgatcgtaccactgcactccaacttgggtgacagcgtaaaaccctgtctaaaagaaaagaaaacagcatcttagcacctgatgaccataaaatagttgccaactgtggttgataaaaagcagaaacctaactcacacaaaattaagaatagagtaaaatgctacagtgtgagaatgtcttactatcaatttttctcagtcctgtctgcatcacttataagtatataccatcatgattgtcaattaataataatactagttttaaaaaatgtttgacttgaaatgtgatcttagactccacttgggcctctctgggtctctctcttctcccccaccctgggctctctcttttctaggctttcctgggtctaggctttcttttggacctacctcttgggtttcctgctcagaaaatgtcccttctagtgttcccagtttctacagggtgaggggtgagggtgggtctttcccacttggttctcccgacctctagacacttagatctgatgagatgtgtgggctgcttctcggagcctcttacatccctaaaactaaagcaagctacagtgagcaaactgaaaatgctttctgtacattttatgtcaatgctatgctagccagaggagtgagtgagggaagagagagacggcatggaaaccaagtacatcacacacactcagacacacacacgcacacataacctcgaaaacctcttgtatgcaattgacatatccacaaccccagacagacacagtcacatgcaaactcttcagacatgcaaccacacacacacccacacaaaccttcagaaatgcagctccatgcatgcagtcatacaatccctacacacacacacttcccacattcatgtacaccctcaggcacacaaccacacaccttcagaaatgcaattccaggcacacagttgtacaattctgcacacagacacactcacacatacacttgccacattcatgtacaccctcaggcacgcaaccacccacaccttcagaaatgcaattccaggcatgcagtcatacaattctgcacacacacatacacattcatgtacaccctcaggcacacaaccacacacaccttcgtggctctgcacaactacccttcatgaattaaatcttacagaggcagtgacagccatacaattcctacctacacacagaaacacacacacacacactctttagggcacaaaacacaaacttcagactttcaaaatcatcctcacatttaaacattcagctccacacacctgttcaggacggcgatcccactcacaaattcagtctctctctctctctgtcacacacacacacacacacacacacacacacacacacacacacacactaatgcccagaccctctgcagcctcagccacatcagatacatctgaaattggtgaaataagccctctgacagagaaggcaaccgagccctataaatgcacaaggcatcgggctcggtgctggaaacgtgcctgtgtgcggaggccacgggttggggaggtggggagacgggcagggagacccggggataactaaggggataggaaactcaccagaacgaccaggagaaaagcggtggcaacggctctaaggggcaagcaggagctcagagacaaagggcggcggagaagtggggacgtgggcgcagggagcgccccacacgcctgaccccagcgcctcggatcccccacctgcccgcaacctccgcgccgcagccacaccgagtccccgcgccgagccgcggagtccccactcaccggcgtccggagcggcgggggcggcctgcccgcgcctcggcctgcgcgctgcgcccggatgcaggagccggagcccggcgaagcgcccggccggggccgcggggacccgccagggactgtgcagcaccggcgcggggaccggaccgtggaggcaccggcgcggagccgggacgcgctatgctgcgggagggatccgggccggccctgcgctcacgtgggtgtgggggcaccgagcggccgggggagggggcgggatcccctccgcgatgccctccgcctcccccgcgcccagcccaggctccgcagccgtgtgggagaagggggacagcgtgcttgcgaagggagggggactgggggtgggcgggggtgagtggcctctccggcatccagcccccgccccctgctcggagccgcgcctccgcgcccccgccccctaaaccgcctccggagccctcggaggccccagcatccctggcggagcgcggggaacaggccctggcaccgcgggacccgctccagcagcctcggcggaggcctggggaaggcgcggctctagtgtcccagtaacaacagccagggagagggctccgctgcccccttctccttgcgggtgcaccttccggccttggccacttggctgctgtgtgcccttgggccaactcctctccctctctgagcctggcttcctccgctaaacaaggaagatggcttggccgaccccacagaaaattaaagctgagaaaattaaagcgcgtgaggctggaaatgctccgtgccagcgcgaagcactgggcaaatgggagatggataatgtcgttcctattgtaattaatattattctttgctgtctttagagcacaccaggcaaggtgcactcgacttttcttctcgaaaggcaatgacttggttgcttcccacatcttctgcctctcctgagagctaatgccatttaaagatctgagcatcaggtctgtcgtatgaataaaaactcagtgcaggctgggcacggtggctcacgcctgtaatcccagcactttgggaggccgaggcgggaggatcacttgaacacaggaggcggaggttgcagtgagccgagatcgcaccactgctctccagcctgggtgacagagcgagactccgtcaaaaaaaaaaaaaaaaagtcagtgcacgttcaatgttttttattattgttgttgttgttgatgaagtgttgatggcgacctcctgaactaggcaggctcttttattaatacttatatttaatctacacactcctataaagtatatatcacttcctctattttcagggcggggacaggtgctcagaaaggttcaataacttgtccaaggtcacacagccaggaaacagatgccccaattctaattctttgcatgcatcgccctggctctgcttctttgcaacaactcctagataggtgattctcaaacttagctgtattttaaaactacctggagaggttttaaaaattctgaagccagcctgacatagtggcccatgcatgtaatcccagcacattgggacgccaaggagagaggatcacttgagcccaggagttcaagatcagcctgggcaacatagcaagactctgtctctatttaaaaaaaaaaaatcaaaaaattagctgggcacacacctgtagtcccagttactcaggaggctgaggcaggagggtcacttgagcttaggaatttgaggttacagtgagctatgattgtgccactgcacttcagcctggacaacagagcaagaccttgtctaaaaaaaaaaaaaggaaagaaaagaaaagatatctgatgcccaagccacaccctataccaagcacatcagcatacctggaagtgggacccaggcatcagtatatttgaatgctccccaatgtatggctaaggctgaatctctgtcctagatgtcagattcccctggaccacattggcaacccctctctgcagccttctcactccgctgcttcagtcactcactgtgcttagacgattctgcatccttcttgaacctagagctgcccctgaactcctgcctcttacggtcattcactccacaaatacttactgtgcacttggatgtgctagaggctggagactcagcagcgaagacaacagagccctcggtctgtcacgcaaaataataagtaaataaaatagcagttgttccctggcaattggccttgcaagccctttacacccgtaacaatcagggaggatcccaaagaaaccataactcaagcctaagcatgagaaaaacatcagactaatttcaatagagaggcatccgataatctacctgcgcagtcctcttcaaaacagtcattaaaaattaaggaacatgtggagcagggtttggtggcaggtgcctgtagtcccagatactcaggaggctgatgcaggaggaccgcttgagtccaagaggttgaatctgggaccgcttgagtccaagaggttgagtttgcagtgaactatgattgtgccacagcactccagcctgggcaacagagcgagaccctgtctctaaaaaaaaaaataaaatttaaaaatgagaaaacaaggaatgtctgagaaactgtcacagccgagaggagtctaagaagatatgacaacaaaacgtaatgtgagatcctagaaaagaaaaaggatataaggaaaaaattaggaaatctgaatagagtatgggctttcgctaataataatgtatccatattggccgggcatggtggcacacacctgtaatcccagccctttggaaggccgaggtgggcaaatcactagaggtcaggagttcgagaccagcctggccaacctggtgaaaccccgtatctactaaaaatataaaattagccaggcatggtggcgggtgcctgtaatcccagctactcgggaggctgaggcaagagaattacttgaaccccggaggcagagtttgcagtgagccaaggtcgtgccactgcactccagcctgggcaacagggtaagactctgtttcaaaaaaagttatctgtaacaataacattttgttaataatgtatcaatataataatatatcaatattacaatatggtaattatacaaatgtgccatactaatgaaatatattaataacaagtgaaactaagtcaagggagcatatgggagctgtctgtactatcttttcattttttatgtaaatctaaaactgttctcagaaactgtgtcttaatttaaaaagatcctgggagatcccaaagagcttttctttatataggttatagctattgatctttacagtatcagaaattaaaactgaaaaagtgtttcaacatttattcattttaacataacaaaaataaacctactacatgttaacataaaatagcatatttttacgaaaaataactgtattttccaaaacaagaacaaaaaaagaagagtgacattgttttacactttttcaaattgctttaatggctaccttcatcaaaaggaaacggaatttttatacagttgattttcattattcacggattctgtatttgcaaagtcactcactcactaacatgtatttgtgaccccaaaattaatacttgcggagattctgacatttttctgggtcatttgcagagagattaacattttgagctgcacggcgtgaacatttgtagctgaggtgcaaaagaaccatgctctgttatcttgtttcagctcatacagtgaacaagcatcctatttgtggcctgtttagtgccatacttttctaactttcatgttttttgttgatttcgctgtttaaaatggtcctgagcactttgctgaagtgctgtctagcgtttctaagctgaagtgctcagtgtgtttctaagctctagaaggttgtggggtagctgggtgtggtggctcacacttgcaatcccagccgcgctttgggaagccaagacaggaggattacttgagcccaggagtttgagaccagcctgagcaacatattgagactcccccatctccacaaaaaattttaaaatgagccaggtatggggggcgtgcctgtggtcccagctactcaggaggctgaggcgggaggatcgcttgagcctggaaggttgatgctgcagtgacctatgatcgtaccactgcactcctgcctgggcgacagagcaagattttagctctaaaaaacaacaacaacaagaacaacaacaccaaaaaaaaaaaaaaaaaaaaaaaggctgtaaggctgtaaggctgtgacgtgccttacagagacaatatgtatgttaggtaagctatgctcagacataacttctagtactgttggccatgagctcaatgttaatgaatcagcaacatatattaaatatggagtctttaaacaaaaacacaaataaaacaaagtatatatcagttgacaaaaatgttgtgaccaggtgcttacagaaactaaatcttgtacttccccctggaagcagtgatttagtatttgctacttcagtgttcaaagcaactttatagggctgggtgcggtggctcatgcctgtaatctcagcagtttgggaggctgaggcgggcggatcatctgaggtcaggagtttgagaccagcctgacaaatatggagaaaccccgtctctactaaaaatacaaaattagccaggtatggtggcgcttgcctgtagtcacagctacttgggaggctgaggcaggagaatcacttgaacccaggaggcggaagttgcagtgagctgacatcgcaccattgtggtgagccgagatcgtgccattgccctccagcctgggcaacaagagcaaagctccatctctaaaataaaaaacaaaaaaaaaagcaacttcatagaatataactaccatgaatcatgaaaatcaactgtatctgcttctgcattgaatctgtaatggtatattgttttggttgaaatacatgaaaaaaattcagtcttacacagacaggcagttgaaaagggaagattattttaatcagcttttcaggtaactgtgtctattctttgagacgacaccaaaatgctacatattttagtttcttcaagaacagttgcaatgcagaattggaaaccctgtccgtgaattcttgcattctgttaatattaaaatccattaagctcgtcttttaaccatgcatgattttgaaacctcatgcattcgtcatttgaaaaatgttagctcactagttacagatctgctacatattaacacatttcattatgcaatagcaaaaagtcatgtttgttaatatcatcactgatctcatggaaagttttaaagtgttgggaagttctcagagtcgtgaatacaaatttttaaaaattataattttcactcaaaagtgcaatttttttgtttgtttgtttagatagagtctcgctctgctgcccaggctggagtgcagtggtgtgatctcggctcactgcaacctccacctcctgggttcaaacaattctcctgcctcagcctcctgagtagctgggattacaggtgcgtgccaccatgcctggctaatttttgtatttttagtagagacggggtttcaccgtgttggccaggctggtcttgaactcctgaccttaggtgatccgcccgcatcggcctcccgaagtgctgggattacaggcgtaaaaagtgcaaattttatcattgacaataatgactgtgaatcattttccttgaagtgacagatatatttctttcatttttgcaaaaatgtctgtcaaacctcctttgatgtggtttggatgttctgtcccctccaaatctcatgttgaaatgtgacctccagtgttggaggcaggcctagtaggaggtgttttggtcacgggggtggattttttgtgaatggcttgctgccattctcctggtaatgagtgagttctcactctatgagttcatgggaaagctcgctgtttaaaagagcctgacacctcctccctctctctttcttgctgtctctcaccatttgacatttctgctccccttcaccttccaccatgactggaagctgcctgaggccctcaccagaaacagatgccagtgccatgcttcctgtacagcctgcagaactgtgagccaaaataaagcacttttctttataaattacccagtctcagatattcctttatagcaatgcaaacagtctggccgggcacttggctcacgcctataatcccagcctttgggaggccaaggagggaggatcgtttgaggccaggagtttgaggccagcctgtccaatatggcaaaaatccatctctacttacaatacaaaaattagctgggcatggtggtgcataccactcagctactcaggaggctgaggcagaagaattgtttgaacccaggaggtggaggttgcagtgagccgagatcacaccactgcactccagcctgggcagcagagcgagactctgtctcaaaaaagaaaaaaaacaacaacagacacacacacagactaatacaccatgtcagaatagctgaggtttgtctgtctaaaaatggaattccatgaaaaaaagtagctggttcagcttgcaattcaaacactcacacaagcagtaattttttttttttttgtcttggagacagctaccatgatacttctgtgtgtagaaaaattttttatccatacttcccgttgcatcacacagaatattaaaaagacatatactcaagagtcaagatttaataaaatgggccagacacagtggctcatgcctgtaatcccagcactttgggaggccaaagtgagtggatcacctaaggtcagaagttcaagaccagcctggccaacatggtgaaaccccgtctctactaaaaatacaaaaaaaaattagcccagcatggtggggggtgcctgtaatctcagctactatggaggctgagggaggagaattgcttgaacctgggaggtagaggtttgcagtgagccgagattgcaccattgcactccagcctgggcggcaagagtgaactccgtctcaaaaaaaaaaaaaggatttaataaaatgaataattgtattgctttatcaagtacaagcctaaatgaaactggctttttttttttttaagacagggtctccctctgtcacccaggctggagtgcagtggtgcaatcatagctcactgtagccttgacatcctgggctcaagtgatgcttccacctcagcctcttgagtagctgggaatacaggtgtgcgccaccaggtctggctaatttttcctctacttttttgtagagactgggtctcaaactcctggactcaagtgatcctcctgcctcggcctcccaaggtgctggaattacaggcatgagtcactgtacctggcctgaaactggcttttgttaaaaccatgagtgtgtggcaatgaagaatataatgacccctagtacagtttggtgctgctgcgttgattcacgcttacatgatagacactgttactcgcccttacttttgctccatgagtgcatagactaacacagtgaaaaaaggcaaataatatcttagaatgattattaaaatcattttgaccttgcagaccccctgaatggtctcaaggctgccacacctggggatttgcaggctacactttgcaaaccattgtcagatggtgataagtcctatggggaaaaaacaataatgagggctggatgcggtggctcacacctgtaatcccagcactttgggaagccgaggtgagcggatcatgaggtcaggagatcgagaccagcctgaccaacatggcgaaataccgtctctactgaaaatacaaaaattagccaggcatggtggtgcacacctgtaatcccagctactcgggaggctgaggcagaagaattgcttgaaccccaggaggcagaggttgcagtgagctgagatcgcaccactgcactccagcctgagcgacagagcaagactctgtctcggaaaaaaaaaattttttttaattaaaaataataattataatcaggaaaagaatatatggagggtgaggagagagtcacagtcttcattaagcagttagtgaatgtccgagtgcgcaggtgatatttgagcaaagacgcaaagcagataaggaagtgagcagggaggatgactacaggaagagcaatccaggtagcgggaacagcaaatgcagagactctgagcagaatatgcctgtgctgtttgaagcccagcaagtacatcatgagtctcccccagtatgttccacagcagctcagactcaaaccatgcccagctagaaagcatttgcaaagcaactcagggagcctagtccagcagagcctgccttttcggttttggcttttttatttgttttggtttggttttttgagacaggatctgactctgttgcccaggctgaagtgcagtagggcaatcatagtttactgcagctttgaattcctgggctcaagcaatcctactgcctcagcctcccaagtagctgagaccacagatgtatactaacaatacaaaaatcagccgggcgtggtggtgcacacctgtaatcccaactactcaggaggctgaggcaggagaatttcttgaacccaggaggtggagagccttctggcatattccccaagtctgctgttagcttccctatcttagtgcacctgaagggaaaggaatgtgtttattaaggcccactgttttactggggcccgttgtatgagggtgaagtttggcagttaaccaagagactttctccccacctccctctgtgccccagctgtcttatttgtgttttatggtctgctctttctgtcttcttgtagttagaagagaagtgatctccctaaaatgcatgaggctagaaaaggagctggaacttaaagtagctgtgtttgtccaagatgatggtgcttctgctctgtgaaaccttatgttcagaaaacaaataacccaattagaaaatgggcaaaggacttgaacagacatttcttaaaagaagacatacaaaatggccaacaggttcatgaaagaaaaaatgctgaatataattaatcatcagggaaatgcaaattaaaaccacaatgagatatcacctaatacctgtcagaatatacaccatagaatactactcagccattaaaaaagaatgaaatcatgtctgttgcaacaacttggatggagctggaggccattatcttaagcgaaataactcagaaacagaaagtcaaatactagctggtgtggtggctcacgcctgtaatcccaacactgtgggaggctgaggagggaggatcccttgagctcaggagtaggagacgaccagcctgggcagcatagcaagatcccatctctacaaaaaataataataattacctgggtgtggtggtgcacacctgtagtcctagctactcaggaggcagaggtgggaggatcacttgaactgaggagctcaaggctgcagtgagccatgatcgtgccactgcactccagcctgagcaacagagcaagatcctgtctttaaaaaaagaaggaagaaagtcaaataccaaatgttctcacaaatgggagctaaacgatgggtacccatggttttacagacaccggcaactccaaaaggtgggagggtcgggggctgagggatgagacactacctgttaggtacaatacacattatttgggtgatggctacactaaaagcctagactttaagagtattcaatatatccatgtatcaaaactgcactgaacccccaaaatctattttaaaaaaaattttttaaggaggagtttcactctggttgcccaggctggagtgcaatggcgtgatctcggctcactgcaacctccacctcctgggttcaagcaattctcctgcctcggcctcccgagtagcttgaattacaggcatgcaccaccacgcctggctaattttgtatttttagtagagacggggtttctccatgttggtcaggctggtcttgaactcccgacctcaggtgatccgcccacctcggcctcccaaagtgtggaattacaggcgtgagccaccgtgcccggccaaaaattttttttaaagaaaaaagataagtggtcaggggaattcggagaaaagacaacccatgtgctctgttggtgggaatgtaaattagtacagccattataaaaaacaaaacaaaacaaaaacagtatggaggctgggcacagtggctcatgcctgtaatttcaaaactttgggaggctgagtggggtggcggggggtggggtgtggatcacctgaggttaggagttcgagaccagcctggccaacatggtgaaaacccatctgtactaaacatacaaaaatcagcgtggcgtggtggtgcgcacctgtaatcccagctactggggaggctgaagcaggagattcacttgaacccaggaggtggaggttgcagtgagccaagttcatgccactgcactccagcctgggcaacagagcaagactctgtctcgaaaaaatagaagaacagtgtggaggtttctcaaaaagttaaaatagaattaccatatgatcctgcagtcccactactggatatgtatatctaaaggaaatgaaatcagtgtctcaaagagatatctgcacccccatgctcattgcaatgttattcacaacagtcaagatatggaagcaacctaagtgtccaccgagaaatggatttttaaatgtactatgctatgcagttgtaagaaaagaaaatcctgtcatttatgacaacatgaacaaatgacaggatttccttttgatgaacctggagaacattatgttgggtgaaataagccaggcactgaaagacaaataccatgatctcacttacatgtggaatctaaaaacaattgaactcataacagcagagaataaaatgatgattaccagagactcaagttggaggattggggagatgttggtcaaaggataccgaatttcagttggtaaagaggaataattttggctgggtgcagtggctcatgcctgtagtcccagcactttgggaagccgaggcaggcggatcacctgaggtcaggagttcgagaccagcctgaccaacgtggtgaaaccctgtctctagtaaaaatacaaaattagccaggagtggtggcgcacacctataatcgcagctacttaggaagctgaggcaggagaatctcttgaacttgggaggcggaggttgcagtgagccaagatcataccactgcactccagcctgggcaacaagagtgagactctgtctcaaaaaacaaaacaaaacaaaaaaaaaaaaaaacgaataatttcaagagatctgttgtacaacatggtgactctagttaataacaatacagtgtattctagacaaatgctaagagagtagattgtaaatgttcttaccataaaagtgaactttggaaggcaatgcacatattgatgagctagatttagccattccacaatgtgtgtgtgtatatttcaaaacatcatgctgtacacaacaaatacacacaattttatctgtcatttaaataaaattttaaaataaaaatatttttaaaacacaccttaaaaaacataatgctgagtgagagaagccggatacaaaaggccacataagtgtatataattctatttatatgaaatgtccagaataggcaaatcctatcctagatttggaaagcagattcgtggttgccaggggctgcaggcgggagaaatgatgagtgatgctaaagggtatagacttccttttggggcgattgaaatgttctggacctagatagaggtgatagttacaggacactgggaattgtactctttaaaagggttaatttgactaggtgcggtggctcatacctgtaatcccagcactttgggaggccaaggtggatagatcactagaggtcaggagttcaagccccctggccagcatggtgaaaccccatctctaccaaaaatacaaaaattagctgggtgtggtgatgcgcacatgtaatcccagctactcaggaggctgaggaagagaattgcttgaacccgggaggaggatgttgcagtgagccgagatatcgccactgcactccagcctgggtgacagagggagactctgtgtcaaaaaaaaaaaaaaagacaattttacattacacaaatttcacttcaataaaacaaaagtaaaggagtaccaaaaaaacctcggtattaaagagaaacaatatttcaatgaaatctttttagaaatcaaaatgaatgcaaaaaaatccacaatgaacaaatagatcaacatgttaaatcaagacaggaccaaagttcctacttttccttctgcttttttcttttttttttttttctagagggagtcttgctctgtcacgcagtggcgtgatcttggctcactgcaatctccgcctcccgggttctagtgattctcctgcctcagcctcccgagtagctgggattacaggtgcctaccaccacgtccagctaatttttgtatttttagtagagacggggtttcaccatgttgggcaggctggtcttgaactcctgaccttaggtgatccacccgcctcagcctcccaaagtgctgggattacaggcgtgagccaacgcgcccagtgccttctgcttttcaggctcctgtgtggctcagttcagcactcttactgattctatcttgaacattctgctatttgggttaaccatggattgtttgcattaatttcatgagttgtttttaattattgacattggagtattatttagcttagtcgccggttttttggtgctacctgatattttgtatgtgggactgactggtatctcaacctcactgtggccttgtgagtctcttgctctctcaacagtaaaggctgccagctcccttttacagataagaagggtctcaaagaggttaagcagcaggcctcagaattaataaagagcagggtcacggccgggtgtagtggctcacgcctgtaatcccagcactttgggaggccgaggcaggcagacaggtggtgcgcacctgtaatcccagctactcaggaggctgaggcaggagaatcgcttgaactcaggaggtggagtttgcagtgagccaagatcatgccactgcactccatcttgggctacagagcaagactctgtctcaaaaaaaaaaaaaatgagcagggttagattggagcccacatctgtctggctcaaacctccagccaccccaggtccactctgaccaaaggctccaactctggccctagcattaggagggcagggcagtgcagacggagcaccccgggctgtcccagacgactgccccagctgcaaggtggagcttgaacacgagctgagccaagaagagtctgagaccgaggaattgaggctaattcctctgtgggaaacgctccctattaattaattagggcagagctagcctgaggcatccccgcagcccccagagtcattaaaggagagggagtctcattatcggctaacagcttccccaccgttcccagggccccagagggagcagaggaggtgggaggaggaccaggtctccccgtcctgatcccctgtctttcattaccagagtggcctgatatgcaagcgaattgtctaaaagtagaatttcaggggaggtaaaaaagggaaagtcagaactgagggattcaggataccccctcccaaattcagtctgcacttatatttatataaaatacccagcacaggtaaatccataaagatagacatccaattagtggttgcccagggctggagtcggggggcaatggtgagtgactgctgatgatgggtagagggtttccttctgggggggtgaaagctgtagtcaaacttgataatgctgacggtagcacagcactgcaaatgtactaaagtcactgaaccgtcaactttcaaatggtcaattttatgttatgtgtattttataatttaaaaaaatcaatctccttctcattcctggctatttcatcaacatttattaacatgtgctttctgcccggcattgtactgggaggggaggcctggtgccaccctggcaactctgtcttagtgagagatgtcatggtcaacaactgtttgaggcctgcatgcaaggggtaaaggaatttaccaagacaagagtgagttttaaaaggcagatgtattaaagaaaggaggacatgcattgcaaggatgcaatgggtaagacagcagaaggaaggttgtctgctgtctgaaaagagtcaggggctggagggaaagttttataaggtggtgctccttcagctgagtgcttgcagacaggatggttgggtgcaggtgggcagtgagctgagtgcttgcaaacaagatgcttgtgtgcagatgggctgtgagctgaaagcttgtagataagatgcttgggtgcaggtgggctgtgagctgagcacttgcaacagaatgcttgggtgcaggcgggctgtgagctgagcactagaagctagcgggccttttgcagttgaccccatttctcagaacatttgcttctctcaaccccagataagcccattctttaagttttcttttaactccttagggctccacacgaaatgatgctggagaccttcaagatggcctccagggatgttctccatctgtcctccccttgttctgtgtccaggttcatggatcaaaccaacaagaagccttgtcctctgtcttctggttggcttcaagcaatgggaagcccttacaggaggcaagagggatgaaagagggtgaggccagagtatttatttcctggggtgcctccctgcatcccccctgcagattggccctagactgcagagcacaaggtcctggctggcagccccctctaggttccagtagtaacagctccctcccctctctgcatctgcccaggagtggtaataacccccagatgctgactgctccacgtaactgcatggattctgcaatcctgtatggtttctttaccccctaccacaccttgacccaactcccctcaaactgcccagtctaccctccatctttctccaggggttagagagaatgcaaccctccgacttgctctgcaccccagaaggtggatttttgtggctatcaatgggctgcctgccttggagaatctggtggggttggctttgtgaaagtaaaataaatttggggaccccaaaatcactaagccaaagggaaaagtcaagctgggagctgcttagggcaaacccccttgcctttctattgcttaaaaagtttgggtgcgccatcctgagtttctttctgttcagacttccctcttgatatgtatttagaagaggaagaagaaaaataagcaggcaggtagtaaagtataatcacaatgggatagtattcagccacaaaaaaaataaggaaatcctgccatttgcaaccacatggatgaactcggagaacatgatattacaggaaataagccagatacagaaagacaaacactgcatgatctcactcatatgtggaatcctaaaatgttgaactcatagaaaaagagagtagagtggccgagtgtggtggctcacacctgtaatcccagcactttgggaggccaagacgggtggatcacctgaggtcaggagttcgagaccagcctggccaatatggcgaaactccgtctctactaataatacaaaaattagctaggcatggtggcacatgcctgtaatcccagctacttgggaggctgaggtaggagaattgcttgaaccctggaggtggaggttgcagtgagccgagatcataccacagcactccagcctgggcaacaagagtgaaactccatctccaaaaaaaaaaaaaaaaaagaaagaaagaaagaaagaaagaaaagggaagggaagggaagggaagggaagaaaaagaaagtagaacagtggttaccataccatagccttgggtggttgaggagatgttggtcaaaggatgccaaatttcagttagataggagaaaaaagttcaagagatctattgtacagcatggttaccctattctcaaaaaatgcgaagcgaacagatgcaaatgcttcaccacaaaaatgataactatatgagggaatgcatatgttaattgactagatttagtcattccacaatatatatatacgataaaacgttatgctatacatgatatacagatacaatttgtgtcaatttttaaatttttaattaaaacatatattaaaagtccagatccccaatgttggcatcaatagttgcttaagtgtgaacaaaaatacaatttgacattaaaaaagtaaagtatagtagtagaagtgtcctcagttgacctcatagaagaagagagatggtagatcactggtagatccaggagctaggttaccccggaaaagaacattagacagcaatatcattgatgaagaagagagagggaaggaaaagggggtgtccattttaaagatcttaaagattttttttactatcaaggtaatttatgttcattgcagaaaatctgaaaaatgcagaaagaatagaaggaaacacggtagaaaaaattcaaccaaatcctatttataatcaacactaaattgttggtgaactgctttccaggtggagatatttgtcttacttcaaaattagaatcatgcctacctgctacatgaataaaccttgaggacagtgggctaagtgaaagaagccaaatgcaaaaggacaagtattgtatgattcaacttatatgagatacatagaatagccaaagcaaagacaaaaagtagaacattggttaccagggactgcagagttgcaaggagaatggggagttattgtttgatgggcactgagtttcatctggggaagacggatgaaggtaatggttgcacaacaatgggattgtacttaatgccactgaactgtacacttagaaatatatacattagaatcctgccaattggtcagtttgttctcctcctcctccttctccttccccttctttctttcctcctcctcctcctccctctcctcctcctctttcttcttcttcttcttcttcttcttcttcttgttcttcttcctcttcttcttcttcctctcattgtaccttaagccgttacttctatctgacatgattttgatggtttattttagtttttcatttttcccactgactgacaagctccaggagagaagagaaacttcatcttactgctccactctcctggctcttagcctggtgcctgacacagagcagatgctcaataaacatttgccaagtcactcgatcaatcaatcaatcaagccattaggaaagaaagattttctagtgggcccccaagtctactctccatccttctccaggaggtagaaaggatgcacccctccaacttgctctgcaccccaggtggtggatttttgtggatatcagtgggctcccttccttggaggatctggtggggtgtgaaaggaaaataaatcttgggacccagaaatcactaagccaaagggaaaagtcaagctgggaactacttagggcaaacatgcctccgattctattcctaaaaaagatagctactaagataaaagagctacatatctccctcacaaggaatttccttgcaggcaaaggacagacaaaactcagtcatccctctgctcactgagataaatgcatatctgcttgcctcctttggaaaggcgaatcagaaactcaaaagaatgcaaccatttgtctcttacctacctatgacctggaagcctcctccctactttgagttgttccacctttctggatggaaccaatgtacttcttacagatatttactgatgtctcgtgtctctctaaaatgtataaaaccaagctgtgcccagaccaccttgagggcatgtcatcaggacctcctgaggatgtatcacaggcactcatttttaactttggcaaaataaacttcctaaattgactgataattgtctcagatatttggggttcatagcttaaaagaatccccagaaaatggcagcattggggcagattaaggcgggaaaccaggatattagaagatgagcttcagacagccaagagagcaagtggctgcttctcccttgctctgctatttgagatgcttccccggtgcacctacctgtgataggcaatgccacacagagacaggccaggaataggcaggggaccctcagctaaaggagcagaagccattatattagttttctagggctgccataacaaatcacagcaaattgtctggttgaaagccacaggaatttattctcacacagtcttggaaggcagaagtctgaaatcaaggtgttggtagggctgtgctccttccaaagctctggaggagaatcttcccttgcctcattctagtttctcatagttgccaagaatcctgggcatttcttggcttgtatatcctctactccaatcttcatgtctttttttttaattgacaagtaaaaattgcatatatttatgatgtacaatatgatgtttgtgtgtgtgtgtgtgtgtatgcactatggaatgaataaatcaagctattaacatatgcatgtaaactaaaaataaaattctatgccctaccaaccatctgaatggacccctcttggccaagggcattccaaaattaacctgaaaaactagttcaggccatgatagaaagacggaatcagacatgcctcattaagctctcttccctttggaattcaggcatagctggccagcattaacattaaaacagagatcttggccaggtgtgatggctcacccctgtaatcccagcactttgggaggccaaggtgggcagatcacttgagggtgggagttcaagaccagcctggccaacatggtgaaaccctgtctcttctaaaaatacaaaaattagccagtcattgtagcacatgcctgtaatcccagatattcaggtggctgaggcaggagaatcacttgaacccagcagggagaggttgcagcgagccaagatcatgccactgtactccagcctgggcaacagagtgagactctgtctcaaaaaacaaacaaaacaaaaaaataaacaacaacaacaaaaaaagcagagatcttaagactttttgtagcaataagacaccaaattccaaattactttagtatagcatcacatgacagatagcaggtcctgaaagaaattgagatattttactctaaaatgtatttctttgacatattttgaaatggctctgcaaagctgtctcttgtgaggaaaatctacactttttggagcatcccttctcctttccaggtcttctccctgatccaggagagaattaactgggtctagaacctttttaagtctgataagaaacatttatttatttatttatttatttatttatttatttatttttaatggagtcttgctctgtcacccaggctggagtgcagtggcactatctcggctcactgcagcctccgcctcctgggttcacgccattctcctgcctcagcctcccgagtagctgggactacaggtgcccgccaccacacctggctaatttttttgtatttttagtagagacggggtttcatcgtgttagccatgatggtctcaatctcctgacctcgtgattcacctgcctcagcctcccaaagtgctgggattacaggcgtgagccaccatgcccggccaagaaacatttataatctactctctctgaagcctgctacctggtggcttcatctgcaaaataagaaccttggtctccacaaccccttattttaacccagacactctcttctatggattccaggtctttatataaactctttcaaccaattgccaattggaaaatctttgaatccacctatgacctggaagccccccaactcctacccacctcaagttgtcccgtctttctgagtcgacccaatgtacacttaacatgtattgactgatgtctcttgtctgcctaaaatgtataaaaccaagctgtagcttaaagaccttgggcacatgtcatcaggacctctcctgtgtcacaggcctgtcaataaccttggcaaaataaacttctaaactgattgagactcatctgagatacttcttggtttacatgcattatctcacatacttatcatttttttgtggtgagaacactgcaaatctctttcagcaattttcaagtacacacagtctccaacttacaatggttcaacttgtgatttttttactctaccgtggggcaaagtagaaaccatcctttgagtagccacacaatcattcttgttttcaccttcaatacaatagtcaataaattacatgagatagtcaacattttattataaaataggtttttttgttttttattattatactttaagttttagggtacatgtgcacaacatgctggtttgttacatatatatacatgtgctatgttggtgtgctgcacccagtaactcgtcatttaacattaggtatgtctcctaatgctatctcttccccctcccccccaccccacaacaggccccggtgtgtgaggttccccttcctgtgtccatgtgggaattgaacaatgaaaaataggttttgtgttagatgattttgctcaactctaggctaatgtaagtgttctgcgcatgtttaaggtagatgaggctaagctatggtgttcagtaggttatatgtattaaatgcattttgacttatgatattttcaacttatgatgggtttatcaggatgtaaccttatcataagttgaggaaaatctctatgcaatatactgttattaactatagttgccacgatgtataacagatctgttgaacttattcttctcttctagctaaaattttgtgtcttctgaccaacatctccccaattgcccccaatcctagcctctggcaaccaccattttattctgtttctatcagtttgtcttttttaccttccacatataagtgagaagatgcagtatttgtctttgtgcctgggttatttcatttagcctaatgtcctccagcttcatccaggttgttgcaaatgacaggatttccttctttctaatggctaaatagtattctattgtgtatatgtgccacattttctttatccaaccggatggactcaggttcattccatatcttggctactgtgaacagtgctgcaataaacatggggagtgcaaatatctccttgacatactgatgccatttcctttgctgatcatcatgttttcacacggcattgtccccatgcatctctgttctcttatacacatggccaacttgtcataaggacaccagtaggatccaacccactccagtaccaccttaccttacttacatctgcaatgaccctaattccaaataacatcacattcacatgtaccacaggggaggactccaacatatctttttctgagaggcacaattcaacccataacagtagataagccctttcaacagttcttcttcccacctaatttgggttatcccacaaacagaaaagatgtttgaaggttgaacagctagaacaggaatgttcatagcagaagcagaagaaagtccttggttggtccacacacatggagtatgttttagcatgacagagcagccatcattatgtcactcagcgaacaaatattaagggtctactttgttccagtttgttcccaaactgggctgggaacttagttattcagtaataactaagacaaatgagatgcccaccaaggagctgacattctagagagggaaggaaaagaattacaatctgacaagagctacgaggggaggagggatggcgtatagcccggtggtgtgagacctcaaaccgagtggtcagagaagagttctttaagagataatatttgaacagagacccaaagcaagaaagggagaaagccatataaaaatgcagaataagaacatttcagagaggggaaaaacaaatgcaaagactatgagaataaacacggatggtgagcacatcatgactgatcctttatgatctttggacagagaggtgggagatggaaggaaaggtgggatggggccagatggtaagaaattgggattctgtagattctggtaaggaacttggatgccattctaaacctgaggttcacttcactgaacccacctattggttgtaaagccacagtcttcctaaccttcttattttcttgagacagggtctcactctgtcactcaggctggagtgcagtggcacaatcagggctcattgcagcctcgacctcccttggctcaggtgattctccttcttcagcctccagagtagctggaaccacaggcacacaccataatgccctgctaatttttccattttttgtagagccagggtttaccatgttgcccagattggtctcaaactcctgggcttaagcaattcatccgcctcagtctcccaaagtgctgggattacagtagtgagccaccacacctggccctaacctaactattaatacccaaattcactaatgagaaaaagattttccaagtaaaaagtgaggaatgagaagtgaatggagaatgaaaacctgatgcacacgctatttctcttttattttattttattattgttttattttgttttgagacaggatcttgctgtgttacccaggctggagtgcagtggtgcgatcatagctcactgcagcctccatctcctgggctcaagcgatcctcccaccccagcctcttgagtagctcagattccagatatgcaccaccacatccagctgttttttgttttgtttggtttggtttgggttgggttttttgttttgttttgttttttgtttttaagaaacagggtcttgctatgttgcccaggctagcctcaaactcctggcttcaagcaatcctcctacctcagcctcccaaagtgctggaattataggcatgagccaccatgcctggcttggatttcttcagagtgagcaagtgaaagagcaagcaagagagagcagaacagaagccatgatcgctttgtaacctaatctcagaagcagcatctatcatgtttgccataggctgttggttacaagtgacacatcaggtccagcccacactcaagggattacacagggcatgaggatcaggaggtgaggaccattcagggccatctgaagatgcctaacccagctgaaaaagaaatccatcatatttgaggggtggatggcggacaaccagctagtaaagaacacagagtagaggtgaaaaagaaaacatgtgaaagagcacaggggaggggattcaagtcacagagggctgacaatttcaaagctaccaggaggtcaagttgagcaggatagaaaagaaactggaatttgtccattgcaggaagacgttgatgatggatgcctgagccattatttttgtttgtttgtttgtttgtttgtttgttttcggtttgtgtttttcatttttgtctttttgttttttgtgggatgttgttgttgttgttgttgttattttgttttttgtaatagagtctctgtctcacccaggctagagcacagtggcacaatctcagctcactgcaacctccgccccccgggttcaagcgattctcatgactcagcctcttgagtagctgggattacaggcatgtgccaccacgcccagctaatttttgcatttttgtacagatggggtttcaccatgttggccaggctggtctcgaactcctggcctcaactgatctgcctacctcagcctcccaaagtgctgggattacaggcataagccaccgtgcctggcctgcctgagtcattttgagggactgaccaggggtacagccatagacacaggtccttgtcactcactgaccagcaaggtcactgcctttgcaggagatgacagggaagaaccaggaagcacctcctctcccagcctggggcttcccaccatctcctgacacctccaccagaaaagcgacctcatttctcaaagacaaaacagattctaggtcatatccccctggaatgagagaccaattgatgtgattatctccaagagaaagaggggcacctactaaaagtagaacctggtgtcccagaagggaagacatcggggaacctaaaaaggggtctctgataattacctgccaagatttcacagcgaagggcatctccatgtaatgccaaaaaaaaaaaaaagaaagaaaagaaaagaaaaaaggctagaagttttagaaggtgctccttcttcatccattctgcaatttcactcgatttcgcccaaaagcagaattctgctccctacattgcatgaatcagtatatagaacaggtggccccagcaaagttgcaaaaaggaatttctataaagtgttctttattataaaaatcaagagagctgccaggtgtggtggttcatgcctgtaatcctagcactttgggaggccaagccgggtggattgcctgagctcaggagctcgagaccaacctgggcaacatggagaaaccccatctctattaaaatacaaaaaattagctgggcgtggtggtgggcccctgtagtcccagctactcagcaggctgaggcaggagaattgcttgaacccaggaggaggaggttgcagtgagccaagatcacaccactgcactccagcgtgagcaacagagcaagactctgtctctaaaaaaattaataatgcataaataaaataaataaaaatcagagagctaatttcacaaagaaatataactccctattggcctgagttagaagtatttgggcttcagtatattgggagaagggaaatatgtatagttgtgtatatgcatgcacacatacacacacacacacagaggcatggtgggggaatgaatgtggaaatggttagagtgaaatcaagatcaagttcagaataagtatctctggatagtaaaacaaaaaataaggctggccatggtggcttgtggccataatcccagcactttgagagggtgaggcaggaggatggcttgaagccaggagttcaagacccagactgggcaacatagcaagacctcacctctacaaaaaaaaaaaaaagtcaattgtgatggcatgcacctgtagttccagctattcaggaggctgaagcaagagatctcttgagaccaggagttggaggctttagtgagccaagattgtgccacttcatttcagcctgggtgacagagtgagactctgtctccagaaaaaaaaaaaagattcttattcatttcattatgtttcccatattttatacattttatacaaggtgcataccttgctttcatagcttatttgttagtttaagagaggtatttaggcttggagagtactgaaaaattttcctagtcctcggtcttgtgtacataatgtttctgtagattttttgaacatcactgtttctgttcagacacacgcaggtgaatcacttggaaaatgagagctaatcccagcccagcaatgaatggttccttccagacaggccaggcacagttgctcacatctgaaaccccagagctttggtaggccaaggcgggaggattgtttgagtccaggagtttgagactagcctgggcaacatagcaagatcgtgtctctacaaaaacatttttaaattagccaggcatggtagcacatgcccatagggccagctacccaggaggctgaggcaggaggattgtttaagcccaggagttcaaagttgcagtgagccatgatggtaccactgtactctactctgggtgacaaagcaagaccctgtctcaaaaaaaaaaaaaaaaaagcagggcacggtggcggtcaggagttcacgaatagcctggccaacaatggtgaacaaattgttctactaaaaatacaaaaaattagctgggcgtggtggtgggcatctgtaatcccagctactcagaaggctgaggcaggagaatcacttgaacctgggaggcgtaggttgcagtgaaccgagatcgcgccactgcactccagcctgggcaacaagagtgaaactccttctcacaaaaacaaaaaaacaaaaaaaccagataactcacctgttcttcaaatacatatcaggctagagaagtgtccaaaatgggtcatcaaagccaggagctagcagtgagtttttggaagttgatatagagaatggaaactgggattgggagatggaaatgagaagttggtctgattaagcaatggtctgcaccaatttcaatgcttagataatagtatcatatactagcagcgtgttggtgtcagcgtgttaaactaataaaaagccagaatgtaacagcctgcatagccctaatgcatttcaccagagagccatgtggaagccaaaatcctcacatgcagatctggcatgaggaagcttcctaagcgtctctcaggtagcttggtacaagttctgcccaacagaggtgcttcatacaccaggcagcaagcctacccaaatgagatcccctggttgggaaggtggacgtacttcatgaacaaagcaaaggtagatggttgtgtgcaggtcatctcacatgaggtgtctccctggttctttgtgaaaccctctctggacctcttctggttttgaaatagctcattcatggattcattctattaataaaagtcaaaagtaaacacttacataatgcttactaggtgtcagccatggtgctaagcacttcattcatattaactcattgtctccatgccacaatcctattacctgagttgacagatggggcaacgcaggcacagagatgttaagtgaattgctcgagatcacgtagacagcaagtggcagaatcataatttgaatcctagttcatctggatccagaatacagaccataatatcctcctgatgctcatgaaaatttgttgaaccagataccactggtcccagcagcaaatgactgtgctaaccccatattcccaagcctccatcgccaaaggttatctggccccatttcttgctagtggccctaaagaacataacggcgggtctccaggatggctggcgtgggagtcgctggttgcccatcttattccccccaccccccattactgaatgatcccttgattacaaacccagggtcattcattctttcttgactgtcgcacctctcattcactcaatacgaaaatatttggacaggcacggtggctcatgcctgtaatcccagcacctttgtaggccgaggcaggagaattacttaaggccaggagaccaagaccagccagggaaagatagcaagaccctgtctctacaaaaaaaaaaaaagaaaaagaaaagaaaagaaaatttaaaaataagctatgcatggtggcacatgcccgtagtcctagatacttaggaggctgagagtgagaggatcccttgagtccaggaggttgaggctgcagtgagccatgatcgtgctactgcactccagcctgggtgacagagtgtgatcctgtctgaaaaaataaaataaaataaaaataaaacatgtattgattcttccacttacgtattcctctaataagtacgtattgagtgcttgccatgagccactatctgtgctgggtgctcggtagtggaatacaatggtaaataggagaggcgaggtcaatgccctcatgaagctcacaagtgaaaaacaaatgtccatcattggtcagatggataaacaaagttatggtatataaatgcaatggaatatgattcagccatgaaaaggacagaagcactgatccgtgctacaacatggacaaatctggaaaacacgatgctgagtgagagaaaccagatacaaaaggccacatagtgtgagactccattgacatgaaatgtccagaacaggcaaatctacagagacagggagcagatgagtggttaccaggagctgaggggacaggggaatgagagtgagcgctcgtggggatgaggttttatttggggattggtgaagtgttctagaattcgatacaagtggtgattgcaccacactgtgaaggtgttaatgcctctgaattgtgcaccttaaaatcattcattgtatttatgaaaatttcatctcacaaaaaaaaatcaagtaagatgatcatagcatgtgattgattccatccgtttctttatcctatgtgtattaaggacccactatgtgctatgaactatacagacactgaggatacaagactagcatgcttcctgttctagaggctcttagagtcaatcatcagagaaatgccaattaaaatcacaatgagaggccgggcacggtggctcatacctgtggtcccagcactttgtgggggcgagacgggtggatcatctgaggtcaggactttgagaccagcctggctaacatggtgaaaccccatttctactaaaaatacaaaaattagccgggtgtggtgacacgcacctgtaatcccagctacccgggaggctgaggcagaagaatcgcttgaacccaggaagcagaggttgcagtgagtcgagatcatgccactgcactccagcttgggaaacaagatcaaaagtctgccccccccccaaaaaaaaaccaaccacacacacacaatgagtctgggtgcagtggctcaggcttataatctcaccattttgggaggctgaggtgggaggactgcttgagcccaggagtctgagaccagcctgggcaatgttagcaagactctgtctttacacaaaatttaaaaattagccaagtgtggtggcgtgcgcctatagtcctcgctttttgggagactgaggcagaaggatggcttgatatcaggagttggaggctgcagtgaaccatgatccccccactgcactccagcctgggccacaaagtggggctcagtctctttagaaaaagagagatatatatatacagaatatctattattttaaaagtaaaaagaaaaaaaaacagaggttggcaaggatgcagagaaaagggaaagcttatacactgttggtggggatgcaaattagtacaacctctagggaaacagatggcaatttctcaaagaactaaaaatagaactgccctttgatccagcaatcccactgctgagtatatacctaaaggaagagaaatcattatattaaaaagacatccacacttacatgtttatggcagcactattcactatagcaaagttatggaatcaacttatgtgtccattagcagatgattggatgttaaaatatggtatacaagctgggtgcggtgatttccccctgtaatctcagcattttgggaggtcaaggaagtcgaattgcttgagtccaagagtttgaaaccaacctgggtaacatggcaaaaaccccacctccactaaaaaaacaaaaataattcgcgttttttttttttttacaggcaggcacctgtaatttcagctattcaggaggccaaggtgatggaatcagctgagcctgggaggcagaggttgcagtgagccgagatcatgccactgcacttcagcctgggaaattggagtgagatcttgtctcaaatatataaacatatatatataaaatatacatatatgctatctacacagatcacatagatatgctatctagatagcatatatatatcggatacaaatgccctataaatagcatatctatcatatatctagatagcatatatatatcacatagatatgctatctagacagcatatatatagcatatctataccaaatacatatgccctatatatagcatatctatcacatagatatgctatctaaatagcatatatatcacatagatatctatatatctataaatatcatatatatgctctctagataacatatatatcacatagatatcctatctacatggcacatatatatagcatatatgtcacatgtatgtgctctatatatagcagatatatatcacatatatatgccgtggaatacttagccataaaaaacagtgaaatcttgtcttctgcagcaacatggagggaactagaggccattatcttaagtgaaatgaccgagaaatagaaagtcaaaaaaactcatgttctcacttctaagtggaagctaaaccatgggtacacatggacaaacagagtggaaaacagacattggaggctcccgtaggtaggagggtgagaagggggtgagggatacagtactacctattggctacaatgtacactatttgggtgatgattgcactaaaagcctagtcttcaccactagaaaatatatccatgtagcaaaactgcacttgtatcccaaatccataaaaataaattttttttaaaggctcttaattcttctagggcaggtgagagatgcccaaaagttaaaaagtaaaccaataaatgaataagataatttcagatagcggtgagtgctatgaagacacgaaagaaaatgtaagactaagccaggcgtggtggctcacgcctgtaatgccagcactttgggaggccgaggcaggagaatcacgaggtcaggagttcgagaccagcctggccaacatggcgaaaccccgtctctactaaaaaaaaaaaatgcaaaaaattagctgggcatggtggtgggcgcctgtaagcccagctactcaggagactgaggcaggagaatctcttgaacccgagaggtgaagattgcagtgagcccagctcgcaccactgcactccagcccagacgacagtgcaagactctatgaaaaaaaaaaaaaagaaagaaagaaaaaagaaagagagagagagaaaagaaaagaaaagaaaacgtaagactaaaaaagctacttttgggtagtcaaggacaccaagaacccagccagcaaaaatctgaagactgcaaagtggccagccatgggagtattctacctgtgggaacagcaagtcccaagcttccaagtgtgaaggcgcttcggacaccctgaagctgaaagaagggccatgtgctggaaggtaacggcgagaggaatgcctggtgagaagcctggcccttcttccatgcttaccgacatgcgacagagtgtgacctggacagctggaagcgcttaggacatcctaaagctggaagaagggccatgttgctggaagcaacggcgagaaggatgctagatgggctctttctcaaggagtcaggatgccagtgcacttaggccaagttccaaagcaaagactccatcctactcctccccccacctctggaattccacctcccttgttgcgcccatcgctatggtgacgggcgctctcagtacactgtctctacaggccaggaaagagttgtgtgtctttggggtcccttccgctccgcctagggttcccggccaggccgagagaccaagcagggaccatgcgcgtgttggtacccccggctgagcgcagccaggacacacgcgttggggccccagcatggcgcgaggcagctcaggccatggcgaggaccgcgcacattctgaccgatcgctgcgggcaggaggcggtgaccatgtggcagcccaaggacagcgtgctggacccgaacgtggcccaccacctcggccgcgccgcctacatccagccctggcgcttccgcgtggagatgatcaaaggcggcggcaccttggagaagccgccgccaggcgagggcgtcacgctgtggaagggcaagatgaagccgcccgcctggtacgcccgcctgccgctacccttgcaccgcaaagcgcgcgccctgcagaccaccgaggtggtgcacgcgcacgcgcgtggagcgcgcctcaccgccgcccgcctcggccgcgcgcagcaccagattaacgggcgggtgcgacagctgctgcgccagcgcgaggtcaccgaccacaggctcagcgaagtgcgcaagggtctgcttattaaccagcagagcgtcaagctgcggggctacaggcccaagtctgagaaggtgggaccctcccccacgcccaaccccagcctaactgcaaagactgaggcctccgctatgcggtgtccagccccggggaaatcctttccatactttgggaggccaaggctggttgatcacctgaggtcaggaattcgagaccagcctgaccaacatggtgaaacccccgtctctactaaaaatacaaaattagccgggcctggtggcgcatgcctgtaatctcagctacttgggaggctgaggcaggagaatcacttgaacccgggaggcagaggttgcagtgagccgagatcgtgccattgcactccagcctgggcaacaagagcaaaactccatctcaaaaaaaaaaaaaaaaaatatttccatagagagaacacccaactccggtgaataagggcacaagaagatgagggccagatgcagtagctcacgcctgtaatcccagcactttgggaggccttggtgtgaggaccgcttgagtccaggccttccaggttgcagtgaactatgatggcaccactgtgttccagcctgggtgacaggtgagaacctgtctctaccaaaaattttaaaaagttagctgggtgtgttggtgcacacctgtaatcccagcattttgggatgccgatgcgggaggattgcttgaggccaggagttggagaccagcctgagcaacatagtgagaccccgtctctacaaaaaaaaaaaaatttttagtggcccagcatggtggcatgcacttatggtcccagctacttggaggctgaggcaggaggattgcttaagcccaagagtttgaggctgcagtaagctataatcaggccaaccgcaaaccagcatgggcaacacagtgagatcccatctctccaaaaattgcaggtaaattagccaagtttggtagtttgtgcttgtaatcccagcacttcaggacaccaaggcaggaggattgcttgaggccaggagtttgaggccagcctggacaacacagcaagaccctctctgcaccaaagtttaaaaaaaatagtcaggcatggtggtgcatgcctctagtcccagctacttaggaggctgaagcaggattgtttgagctcaggagttcaaggctgtagtgaaatatgatagggccactacacttcagcctaggagatagtgagactcaaaaacaaacaaacaaaaaaagatgatggatacaggcccaggaagagatgcctaagcccccaagacccaaagagtgagccctgcccaaggagatgagatcctcagcttccctgccccagaggagaaaattatccaaatctcccagccagggagagagggtgcagcccctgattcagactccttgaaaatctccccaaaaagtaaaacccacagccctcagcccaggcataaaatcatccacctagaccctaggcccagagggtaagacccttccatagatgtgagaccctcagtgccccagtcctagtgaaaacacactcccaactcccagctgaggagagcggctgatacccttgtcccaacccaggtgaaactcccccccagaatgttaaataaaacccaattcccctggcttcaggaagtgaaaatctccacccccaggcctcgtctgtggtgaaaggaagaagtcctccctacagagagagacttcagactcccaaccctcacacccaaaggttaagctcccatccagggagaaagagtaagacttctagtaccagtcctggtgaaatcttccccttaaagtgaaatctcaaatccccaccccaaaaggtacaaaaattcctgcctcccgggggagagatgagaccccacccacagaatgggattcctaccctcagcccccagatccaaatattaagactccaaaaacgtaaaccctcatcatccgtatgatatgatccctccacctgtagccagggagaggagataagaccatcactgaggaaggggtgcccagctcccagcctcagggggtgagaacaaccctcccccaagttgagacaccttcatctcagccccctgggctcctatctgtaaaagagagacgcccccaacctcaagctccagagagcaagacccgccaagtcagagagcccactgaaaagatcaaaccttctcaaagagtgagacaccccacccaaaggatgagagtaccctcaacttcatccttcaaactcagagtttatgaggctggcaaaccctctaccaccctggaaagaggaatctcttcccagccctttcttaacgatgtgagggattctctcctcgttttctaggtccctgacaaagctgacagtatgcttacatgggagaaagaggagctgaaaagcatgaagaggaaaatggagagagatatggaaaaatcagaggtcctactcaaggttaggggtgcctgtggacaagttacgggggctggagggggatccctggctgcctaatggacaaaccactctgacctggggactgtcacaatagcaattccttcaagccacactgaccagatattcactgcattttgctttgtgaaatggaaaaagggaggtcatgggagatgacgttgggtctcagaataacaacgaacaaccactctgtaccaaaccctgcgcagtcattgaatccactccttaaggctgtcctgtgaggcagaaactatgatttcctcaatagagatgggaaaattgagacccagagagagacctcacctaataagcaaagccatcagtgaaagcgctgtggtttcagcccaagtgactagagtctagctctttgcactctaacacgtgctccagcttcagccagacttgatctctcgctgcatccttcgcacttgcaatgagaacttcttcatgagggcacaaattaagggggaagagcagccagacttcagggggccttttggacctgttaaggttcgctggaaatttgtgtgctttcgactcatccttttgataaatactaatctggtacctgcttcccaggcaccaggcttggcatcatagataaagtggtgactgagaaagaactagccttgtccttgaagagttaacattctaaaggcattcaaagaaaatacaggctgggaacttgttttatttcctattgtgagattgaagtcttttattgttgttgaactttccttgcttttatgtatagatctcctcagctagactacatttaaaaaagcattggaccttgaaggcagatatagtactaaattatatttcacgtagcaaagctcagtaaggttgtgttgactggggagtggggaggaggggagaagaagggacaggctgggggacgagggtgtggacgaggcaggagactcagtgggggggcggggggcgggggctgctgaaacgctgtccgtggtgctgaatcggaatactgcatatcttctggccgctgtcatattcctttaaatctgatgattcctgaaatatccttccaggaagtcggaggcagagaagggagaagcccctgaggatggacgtgggagcaaagggctataaagagggaaatggatcatgcccataatctcagtactttgggaggccaaggcaggaggattgcttcttgaggccagaagttcaagaccagtctgagcaacatagcaagccctcatctatattttaaaataaaataaaactagccaggcacagttgcaagtgcctgcagtccctattcaggaggctgagggaggaggattgcttgaatccaggagttcaaggctgcagtgagccatgatcatacctctgcgctccagtctgggtaacagaggaagaccctgtctctgtgagagtgagagagagaggtgggaaaggacagatatagatagaaacagagacaggctgcttggcaggacctagtctgaatattgctggagaaaaatacttaccaccaatcagatttgtttcaacttaaaatcatgaagtcaaacctcaaattggcactcaaacctttcccagatacctcgccttaagtctctagaagacttgctgacctgctgggcaagtgatttcataacttctcttcctttagtcctctccagctccctgtgccttccttgctctacggtgatttcaatgaaaaccaccaaagggaacctctctcatttttcctctgtcaatcctataattccacccttccacccttctcctgcaccatcaacatttccttctctcttggctcattgtcaccagtgaacaaagggagaattattctttcatgggtacagatctgttgggatgatgaaaaattctggaggtggattgcaatccagcctggaagacagagcaagattctatataaatgaatgaaggaaggagggaaggaacagaacaggtaaaattaatctccaagtcagcttactggagatgatggttgtacgaatacacttaatgccactaaactgtacacttagcaaggttaaaatagaaacatgttatgtcatatctattttactacaataaaaagcccacctctcttgatctacatgcccctctagatacccatttctctagtccactgcatcttatctgcatatgtcaacttgctcatgttgactccaggcaggctcctcagctaaactgcatttgaataagcattggaccttgaaggcagatacagtactaaattatatttcatgtagcaaaactcagtaaggatgtgttgactggggggtggggaggaggggagaagaagggacaggctgagggtcgagggtgtggacgaggtaggagactcagggactggtggaacgctgtccgtggtgctgaactggacagctgtccttttttttttttttttttttttttgagttggctctattgcccaggctggagtgcagtggcgtggcgtgatcgcagctcactgcaacctctgccttccgagttcaagcaattctccgacctcagcctcccgagtagctgggattacaggtgcctgccagcacacccggctaatttttgtatttttagtagagacgtggtttcaccatgtgcgccaggctggtctcaaactcctgacctcgtgaccacctgcctcggcctcccaaagtgctaggattacaggcatgagccactgcgcccggcctggactgctgtcttgctggtcactgtatccccaccacctggcacatcgcctggcatcagtaggggtttaattaatatttgaattcatgaacaaaagactttttaagtctgctttttaaccaaatgaataaatcccaaagataccatattcagagaaagaagctggacataaagtgtacactctgtaggattccatttatatgaagttttagattcagcaagggttttcctcaaggtacagttagtaaatgctttcagccttgtgtgctgtgcagtttctgtcacaactactcaacttggccagtgtgccatggaaacaacgagaaatgatatgcatatgaatgggcatgactgtgtttcaataaaattttacttacaaaaacaggtctgccatccataggatggaaatttatcaactccttaacaacaggcaaaactcggctgggtgcagcggctcacatctgttatcccagcactttgggaggcccaagcaggagagttgcttgaggccaggagtttgaggccaggaatttgaggccagcttgcacagcatagcaagatatcatctctacaaaaatgtttaaaaataactgggcatggttagcatgcacctgtagtcctagctatttaggaggctgagctgagaggatctcttgagcccaggagtttgaggccacagtgagccaggatcatgccactgcaatccagcctgggagacagagcaagattctgtaaatgaatgaaggaaggaaggactaaaacaggtaaaactagtctccaagtcagcttactagagggggtcagggagggacagaggaaaggggagccagagaaatgtatggcatgatggaaatattttatatcttgatggagagtgtttataagggtgtatatatgtgcaaatgacttgttttgatataactctcaaataattgcaaatatcaaaggaatatgatatgcttcattttattgtggaggaagtaagatttcgatggcgggatgctgtccagatgagacacagcctggtgggaggggggaactcagagaatagcagtctcttaatattgatcagagcagaggaagggagacttcaaggctagaggtggggatgggatgagtgccagttgagaatcaagggggtgacacaggaagatcaagatgtgggtatagtgagtgccagctctccatgttacagtggggaaatgcatgagacaggctcttttctcagggtgccagaacagagccaggcacagaaaccaagcaattgacacccagcacagggaagctgttgctgtctcttactgctcccctcaccccacccccaaagagtcactgaaggcttctgaactgggtaaggaggcaggagatgtctgagcttcaacttaggaattgcttcttcccaagaacacaaacaagagctggaaaggggccgggtgtggtggctcacacctgtaattccaatactttgggaggctgaggcaggaggatcacttgagcccaggagttcaacactagcctgagcaacatagcatcactctgtctcaaaataaaagaacaggaaagggtcaagaatggagtgaggaaggaaaccaatttctcagaaccaatccatatcccagcactttgggaggctgaggcgggtggatcacctgaggtcagaagtttcagaccagcctggccaacatagcaaaatcctgtctctactaaaaaatacaaaaattagctaggtgtgatggcacatgcctgtaatcctagctactcatgaggctgaagcaggagaatcctttgaacccgggaggcagaggtttcagtgagccaagatcgcaccattgcatgatctgtctggaagtgagcagactcacttttacctgattattatgcacagtaccataaacagaagacaactttgtgaataaaaaagtgattttaagacatttctctagctgggcacagcagctcgcgcctgtaattccagcattttgagagcccaaggtgggtggattgcttgagcccaggagtttgagacaagcctggacaacatagtaagaccgcgtccctacaaaaattaaaaaaaaataattagccagtgtggtggcatgtgtctggtgtcccagctacttgggaggctgaggtgggaggatcgcttgagcacaggatgtccaggctgctgtgagctgtgatcatgccactgcactccagcctgggagactgagtgagaccctatctcaaaatatgtatatatatataacttccctggattacctgacatccaagtgaacacccatcacctgggaaaaatgtaagcagaattgcctgacccttgactcttatttccacgttcccataccttaacacaccttcccttctctaaaagccacgtttgcaggaatatctattcagcaccaccaactcatccatgtgtttatctgtaatggctattgaggaaactgtactgttcatggttgtttttgtttttgttttgagacaggatctcactctgttgcccaggctacagtgcagtggtgcaatcatggctcactgcagcctcaacctcctgggctcaggtgacccccccacctcagcctcctgagtagctggaattacagacgtgaatcatcacaccttgctaattttttgcttttttgtagagatggagtttcaccatgtggcccaggctggtcttgaactcctaggctcaagcgatcctcccatcttggcctcccaaagtgctggaattacaggcatgagccaccacacccagcctgaatgcagtgattttttcacagtgtgtttataggtcaaaacatcaagttgtacactttaaataaatacaatttttatttatcaattatacctcaataaagctgggaaaattaagtggaaaagaatacgttttaaatgaacttactacaaaaaaatgataagtatgtgagacgatggatatgttaattagtttgataacatccttccacattgcatacacaaatcaaagcatcacattgcatgccataaatatatacaattattatttttcaattaaaaacaaaaatttaagtaaaataataaagtaaaccttgaggggtggtgtgatgtgagtcaaaggaggaaaaagaatcattttttcataagatgtagacatgtctctcctaaaaaagattttgtgaaagaaaatatttatctggaacattggggaaataagttaaatcaaaaaatatttccaggccaggcacagtggctcatgcctgcaatcctaaaactttgggaggctgaggcaggaagattgcttgagcctaggagtttgagaccagcctaggcaacatagtgagaccctgtctttacaaaaaaataaataaataatacaaattagctgtctcaggaggctgaggcaagaggatcgcttgagcccaggaggttgaggctgcagtgagttacgattccaccactgcactacaacctgtgcaacatgtgtctcaaaacaaaaaaaaataatatatatatacccataagtaaaaacctttaccagtatcaaaaaaaaaaaaaaattaggcacactgcctcacacctgtaattccaacactttggaaggtcaaaggaggaggatagcttgaagccaggagttcaagaccagcctagacaacatagtcagaccccttcttcacaaaaagttttaaaaatagcaaggcatggtgctttactcctgtagtcccagctactcaggaggcttaggcaggaggattacttgagcccaggatgttgaggctctagagagctatggtggcaccactgcactccagcctggatgacagagcaagattttgtctcaaaaaaaaaaaaaaatgagagtgtcagtttccgtttagaggtagaaatgctttacagcctataaggctcaagcctgcagcagagaaatcacttgcatccacttccctcaacctcccagttctcactctgtcttctcctcccctccccacccagaccctggcctcctgccgagacactctgaacttctgcttcaaggagcggctccaagccgtggacctcatgaaccagcctctggacaaggttctggagcaggccagacgccactcatgggtgaacctctcccgagcccccactccacgcacacagggtcagaaaacgcctcctccagaccctgtgggcacctataacccaggtaggagtccactgtactgggtcgtattggtgcccacccagatccccttgactgtcagtgcagcccgtcgcccacttagctgtccctttcctgggaaatagccctagagtcaatgggaggactgaaagcctatcatgctgagcacacattgtcactcagcttttccccctgcactctcctgcccacactcgctgaggactcagtcattcacaggctctgctttttttttttttcctttgagatggagtcttgctctgtcacccaggctggagtgcaatggcctgatctcagctcactgcaacctccgcctcccaggttcaagtgattctcctgcctcggcctcctgagcagctgggattacaggcgcccaccaccacgcccggctaatttttgtatttttagtagaggcgggtgtttcaccatgttggccaggctggtctcgaactcctgacctcaggtgatccacccgcctcagcctcccaaagtgctgggattacaggttacaggctctgcttctaaggaaaccaacccaagacgcttcttacactatcccccgcgccccctggactttcacccagttcctcaataaaaccccctcgcccagggcccaccaccacctgagaatagagagagggacaggggctctgggaacggaggacttggcacccccacgcgcatcctgggcatttgcagcgtgcgccttggcgctaaacgaagccaagcggttgttggtcgagtccaaggacaccttggtagaaatggcaaagaacgaggtggacgtccgggagcaacagctgcagataagcgaccgtgtgtgtgcctcgctggcgcagaaggcgagcgagaccttggagctgaaggtgagcgcattacctgcggctgcgggccagggtgggacaggggaggagacgcggactgggagccagcgtgatccccctgcgcttccctgcccccaggaaagattaaatatgacgttaggactgatgaggggaactatcctccggtgtacgaaatataaccaagagttgtacaccacccacggtctcatcaaggtacggttcggggtgagagccttcgggggtggaggcaggggtgccggtggctggaggctgggtttcaatgcgcttgcacaccgcaccccaccagggtcctctgtcgaaagttcacctggagaccgcagaaaagctggacagacccctggttcgcatgtaccagagacacgtgggcacccaactcccggaggctgcgcgcctcgcacaggtaaaccccctcccccgtacccctctaggcccagccccgccaatggtaaggctccttcctcaagcacatctggaccaggtatgatccccctctcacccaagtcggcctgtccttcaactcctgccacgaagtggggaggcgggggcttcactgggtactgaagtgggtactggcgggggcttcagtgggtactggctcaaataagtcccctcaacccctgtcctcccccctcacacacaccctcactgtccagctctggccttagtctctctaacctgtaaaatgaggagcacgtcagcacccacttcaaatggtggtggtgaggacagatgagttcatgcatgaaaggtgtgtagcatggcacctgcatagaatacccttaaagctgcccagctgttattattaactattattgttattattatttgagacagactctcgctctgtcgcccaggctggagtgcagtggtgcaatcttggctcactgcaaccttcacctcccgggttcaagcgattctcctgcctcagcctcctgagtagctgggattacaggtgcgcgccaccacacccggctaatttttgtatttttagtagagacagagttctgctatgttggccaggctagtcttgaactcctgacctcaggtgatccgcccgcctcggcctcccaaagtgctgggattacaggtgtgagccaccgcgtccggccctgagctgttattattaagtacccttcctaaggaggatccttcctacacatcttgactagatgcattcccctccctcagcctgccctgtcgcggttttttttttttccaggcacacctggcccattcagatgtgttcccctcctcagctgtgttccttacacacacacctggcgcaggtgtgccttcccacgccaggtagccatctgctctggctcacgggtctgccctgctccctatccagggcaccgacaagctgcagtgccacatcacgtacctggaaaagaacctggacgagctgctcgccacgcacaagaacctcagctggggcctcaactgcaagaacatcgggcatgaggtggacggcaacgtggtgcgcctgcgcctgcgccagcggcaaccgcacgtgtgctacgagcaggcgcagcgcctggttaaggactgggacccgcgcacgccgccgccgcgcagcaagagcagcgcggacccctagtgaccccagcgtcccccgccccagccagctgattggatgctggctgggacctcggagagcagacacagccccatggccctccctctcccctgacgcaccctccctccaagcaccctctaggagaattataattaaaaataacaataattatcatgtattaggcacctactgtatgtcaaccacttaccctaggacacgttataagcgcatatcctggtagttaataggatggatttgggtgccagatggctgggatttaaattccagcttcccagtttcaagctgtgtggccttggacaagtcactgtccctctctggccttggtctctccaacctgtaaaatgaggagcatgacagcacccacttcaaatggtggttgtaggcggggcgcggtggctcacgcctgtaatcccggcactttgggaggcggaagcaggcggatcacctgaggtcaggagttcgagaccagcctggccaacatgatgaaaccctgtctctactaaaaatacaaaaattagctgggcctggtggtgcgcacctgtaatcccagctactagggaggctgagacaggagaatcgcttgaacccaggaggcggaggttgcagtgagctgagatcaagccactgcactccagcctgggtgacaagagcgagactccgcctcaaaaaaaaaaaattggtggctgtgaggacagatgagttcatgcatgaaagccctatagtatggtggctgcatagtatatcctcaaggcacctgagctgttattattggcatctccattttacagttgaggaaacaggcacagagaggctgtgcagcttgcccagggtcacacaggaagtagcaaaactggaattttcattccagactcaagagcctgcactctaagtggaacttctaggagctctgctctgtcctaccccatgtggtgtctggtcctgagcccagcactgagaataaagcagtgagcagggctgatgtggtccccactctcagggaggtcacaggttgatccagtgcagctaatgtcatccatttgggtgtggctctggttcaggtccttctgcttttccagtaggctcttggacaccccgccatcacaggacccctcacactgagctgtgattcttatctgctcttcccaggaagatccagggtgttgcacacatacagaaagaatgtgcattacagccacaggtatctcctaagcaactgctctgtgtcagaggctgtgtgaggcgccagggatacagcaaggatgtgtccctccgtcgtggagctcacagtgtatatgctgagaatggccttcacaaatgttggtatccttttggcaaagccagccaattgtatggacctaagcaccaacgtttagcagagaagaaaatgaagctcatttttcttctcattttcccagggttacacagccagagatgggtaaagcaagatttcaacctgtcatgctccacatctcaagcagggaccaggatctgaatgagtccccaaaacaagagaatggagattgggtcaattatggccactggacagaaaaacgcatgggcaaaaaagagagccatctgcccaggatgacagacctgggtaggagttcagctggggatcggctccattggtctgactcagaagcattgtgtgtcacagccagctcccttatgtcaagacagactctacagcttgggggttacaggcccccagtctccctggggctcagactcccacataaactattcttcttcaagcacttcttcccagtaccaatcaggatatcaacaagaaacagcacactccatttgcaagaagtttaagggccaggtgcggtggctcacacctgtaatcccagtacttagggaggccgaggcaggcggatcatttgaggtcagacgttcaagaccagcctggccaacatggtgaaactctacctctactaaaaatacaaaaattagccaggcatggtggcgggagcctgtagtcccagctacttaggaaggctgaggcaggagaatcgcttgaatcccagaggtggaggttgtagtgagctgagatcgccccactgcactccagcctgggtgacagagtgagactctgtctcaaaaaaaaaaaaaaaaaaaagagagagagagagaaagaagtttaagagaccacagttgatcctcattatccccaaatttacttgctaattcacttaccgaaatttatttgtcacttcaaaatcagtacttgtagtgctttcacaatcatttgcaggcatgcacagagccgtgaaaacatttttagccacctgatgttcacactgcccctctgagggcaaagaaggtgatgctgcctttttgtgccagctctcttaccataaacaagtgtccttgtggtagcctatttagcatctctgtctctctctctcttttttttttttttttttttttgcatttttgtgcattttgttggtggtttttgctgtttaaaatgacttccaggggttagtgctgaagtgctgtctactgtccctgagcacaagaaggctgaaatgtgtcttaggggaaaaatacatgcgttagataagcttcattcaggcatgcattatagtgctgtggccgtgacctccatgtgcatgaatgcatcacatatattaaataaggtgtctttttttttttttttgagacagagtctcactctttttgcccaggctggagtgcagtggtgcaattttggctcattgcaacctccgcctcctgtgttcaaacgattctcctgcctcagcttcccaagtagctggaattacatacacacaccgccacacccagctgatttttgtatttttagtagagacagggtttcactatgttggccaggctgctctcgaacttccgacctcaagttaacttccaaccacccgcctcggcctcccaaagtgctgggattacaggcatgagccaccgcacccggccaaataaggtctctttaaatagaaacacctaaaacaaggttatgtcttgattcgttgacaaaagggctgtgaccacaggctcacagaaacctaatcctgtatttccccatgagccatggttcagcgttcactgattcagtgtgcgtggtggctttatggaccattaccgcaaataacaggaattaactgtgtttgcaaaggtgtgggcagctagtagggaaacctcaaaggatagctagcataatatccacatgccagtgattgcggggagccttttccacctgtgggtctgaagggaaagggctgttagcagatgggagcatgtaactctgtgatgctgcagtgtagacgccgtgaaatgcccctacccacctctctgtccattggccagtgtccccgatgggccgaaccaccctgctgacttttgaccttcacgcaggtccttcccggagctgggaattatccctttaccctcacctttgcccatcttgatgcccagaaatcttgcataggaggcaaatgctccccttgcaagcaatgtcttgccctggggtttgcagcctgccaccctcaccttgctgtcaccgccccagtttgtgacctcagctcacacaatgtccccaaacagcatttgcacaattccccccattgcctcagagctgagatttcagctgctgccctagatgtgagtcctgtgcacccagcaagcttctccacgacaccatgaggtgggtgtcattatcccaaccttagagatgaagaaataggcccaaagcagtacaaaatgtatagatgccaccacccagcaagtaaggggctaagtgtgggctgtaaaaattgtaggcagggcaggcgcggtggctcatgcctgtaatcccagcactttgggaggccaaggctggcagatcatttgaggtcaggagttcaagaccagcctggccagcatggtgaaaccctgtctttactttaaaaaatgcaaaaattagctgcacatgttggcacatgcctgtagtcccaactactcagcaggctgaggcgggcttgaacccaggaggcagaggttgcagtgagctgagatcacaccactgcactccagcatggccaacagagcaagactccatctcaaaaaaaaaaaaactgtagggagtccccttaccccccaaaagtcctcctggctggacacagtggctcacacctgtaatctcagcactttgggaggctgacttagaaggattgcttgagcccagaaggttgagacaagcctgggaaacacggtgagaccctcatctctacaaaaaaagtttacaaaattagttgggcatagtggcccatgcctatagtcccagctacttgggaggctgaggcaagaggattgcttgagcccaggagtctgaggctgcagtgagctgtgatcacaccactgcactccagcctgggtgacaaagcaagattctatctaaaaaaaaaaaaaaaagtcctcccatacccctcaaacaatgatcaggtatcacctgcatgagaacacctacgtgcaccaggttccagggtcacactccagacctacggaatcagaatctcagaaggcaaagcacaaaaatccgcattgctcatgagctttctaggagggtccaatgcacaccaatgcttgaaatgcattgcctgctgttgctggtttcccagggctgacttctgcattgggcatagtaaacactaatgagagagcccacaaaaaatatttttattgtaatttctttctttttttttgagacagagtcttgctctgtcgcccaggctggagtgcagcagtgcaatctcagctcattgcaacctccgcctcccaggttcaagcgattctcctgcctcagcctcccaagtaactgggattacaggcagccgtcaccacacccagctaatttttgtatttagtagagacggggtttcaccatgttgatcaggctggtctcaaactcctgacttcaggtgatctgcccaccttggcctctcaaagtgctgggattacaggtgtgagccactgtgcccgacctgtagtttctttttaaatcagaagaaaaatatgaatataataataaatatatgacatactgcattgtatgttatttatgtgatacacaatttatattcatctctatactaatgtaggggtgtttttcacattttgggagttttggggggtttttgagacagggtctcactctgacacccagactggagtgcagtggcataatcatagctcactgcagcttcaaactcctgagctcaagtgagcctcctgtctcggcctcctgagtagctgggacgacaggtgcatgcccccatatctggctaatttttgtatttttttggagcgatggggtctttctctgttgcccaggctggtctcgaactcctggcttcaagtgatcctcccacgttggcctcccagagtgctgagattagaagcgtgagccactgcaccttgccttttcagcatttttttcattgtggtaaactacacacaacaaaatttaccctcttaaccatttttaagtgttcagttcagcagcattaagtaccctcacagtattgtgcaaccttcaccaccatccatctccagaactctttaaatcttgcaaaacagaaagtctataccctttaaataataaccgctcctttcctcctccgcatcccccagcccctgtcaaccactgataccatagataccactttctgtatatgactttgactgttctaggtacctcatataagctacatcaataaagttttacgtatttattttttgatggaagaaggaactcacaaaggtaaatgtgcctcaggcccataaaacccaaaatttggccctacaacttccccttaaaatattgggcacattcctctcattcatgtatttattttacttatttaatttatttattttttattttttgagacagattttcactcttgttgcccaggctggagtgcaatggcacgatctccactcactgcaacctctgcctcctgggttcaagcgattctcctgcctcagcctccagaatagctgggattacaggcatgcgccaccacacccagctaatttttgtgtttttgttagagacggggtttcgccgtgttggccaggctggtctcgaactcctgacatcaggtgatccgcctgcctaggcctcccaaagtgctggaattacaggtgtgagccactgttccaggccgacattgggtaaatatttaagtgaatacatgaacaaataaacagataaagtttgcagagtgttactgtgtgcattgccttatttaattttccactttagacctggaaagttcccttcgtaatcatccagttcaccatgctttgctgtcttccttattctctttccaattttcctggaaagtgagaaactgacatgggaagcaagcagcacagcatccgctgtgggagagatgcagacctgggcttgaccctttagagctgtgttacctcgggcaacttgctcaacctctctgaccctctgttttcgtgacctataaaactgtggatgggcggggcacggtggctcagtgagcctgtaatcccaacactttgggaggccgaggcaggtggatcacctgaggtcaggagtttgagaccagcctgactaatgtagtgaaaccccatctctactaaaaatacaaaagtagccagatgtggtggcgggcacctgtaatctcagctactcaggaggctgaggcaggaggatagtttgaacctgggaggtggaggttgcagtgagtggagattgcaccactgcactcgagcctgggcgacagagctagactccgtctcaaaaaaaataaataaataagataaaataaaaaaataaataaaactggatgataaaggtatctctctcatcaagttgctgggaggatccgttaaggcaatggggtttttgcatagtattccatggtgtatatgtgccacattttcttaatccagtctatcattgttggacatgcgttggctgggttggttccaagtctttgctattgtgaatactgctgcaataaacatacatgtgcatatgtctttatagcagcatgatttataatcctttacatggatgaagctggaaaccattattctcagcaaactatcgcaaggacaaagaaccaaacaccacatgttctcactcataggtgggaattgaacaatgagaacacatggacacaggaaggggaacatcacacaccggggcctgttgtggggtgaggggaggggggagggatagcatttggagatatacctaatgttaaatgacgagttactgggtgcagcacaccaacatggcccatgtatacatatgtaactaacctgcacgttgtgcacatgtaccctaaaacttaaaatataataaaaaaaagacaatggggtttttcatttagttcagggcctggcatggggggaggtctccacacatggtttatgctccttttgtttatcaaaatgacattcacataaaatgagccatcttaaagttagtggcatttggtaaattcacaattgttgtgcaaccaacgcctctatctagttccaaggtatttacatccccccaaaaaggagaccctgtgcccatcaccagtcactccttatttcactctaagaaagaccttactgcttctaaccatggaggccatgctttgcaaagcagtgagttccctggccaagaagcaatcaagcacgggctataatttttcagggagcctcatacaggactaaaacagtgggtgttttgttttgttttgttttgttttgttttgtttttttgagacagagtctcgctctgtcacccaagctggggtgcagtggtgtgatctcagctcactgcaacctccgcctcccaggttcaagcgattctcctgcctcagcctcccgagtagctgggattacaggcatgcgccaccatgcccagctaatttttatatttttagtagagacagggttttaccatgttggccagggtggtctcgaactcctgacctaaagtgatcctcccgccttggcctcccaaggtgctgggattacaggtgtgagccactgcacccggcctaaagtagtgtttcttgaccaggcgattctcccactactcttagggacatgtggcaatgtctggagacatttttggttgtcacaactggggatggaatatcttgctggcatctattgggtagaggccagggatcctctgaaatatcccacagtggacagggcagcttcctgccatgacaaagaagtcttcagttgaaaatgtccattgtatcatggttgagaaaccccacaccaaaataagataactcagaatcatcttcaaagtcaaaaactcttgaacaaagcctggaagtagagacagcagcatattgggattggttatttcagtgcattcttctttccatctatagggacactccgaggtctcatcatcaagtatttcttccacctaaaactctaggatatctgggggaatgagcagctctctccatcaagtccaaatgtgttgtgatatggtttggctgtgtccccacccaaatctcatcttgatttgtaggtcccacacttcccatgtgtcatgggagggacatcttacatggtggcaggtaagatgattaatttgctatagcttccacattgtattccaaaataactgtcccagcacccctcctcatgcctgtggtcagcagggagaaggaaggaggaaggaagaaggaaaagacatgttcctcccctttaagggcatgacctggaagttgtacatacaacttctgctcacttcctattgtccagtacttagtcacatggctacctgtagttgcaaaggagcctgggagacataatctttagcttggtggccatatgccaaactcatatttatataactctgccactagatgcagtatggatttgggggaaacttgaggttttcgtgacactcttcatccattaacaaagaatacttgaggctgcagacttgaggaaatgcttgaaagatggaatgaagagttgagtgatctagggatcaggttgaccatgaatgaagtagggacaagactttcagtcccaacaaagtatttagttgatggaattctgcagaggatggtgactcacgttctagaacctagaaatgggaaagggcccaatcacctcattttacaaatgaagctgctgaaacccagataggagaagcaatttcatttaggtctttcactgagtttgtagcagctcagggctaaaattgaggtccccgactccattctcagtgctctcttcacaactccattcatcctctagagctgtagactgagaaagcaaaccatgaggcttgtggctttgacatgaaggaagcaggacactgctagatccttgaggaggcatatcttggctaaggataggctgagagggcatggagaagccattgagacccgttgtggctatggaactatattctggccaactaaatgagagtagaagggatatgtgaaatattccagcaattcctttaagggaaaggagcatacttctttccccttcccctttcctctttcttcccaactagaacataggatgtgatgataggagctgaagcaaccactttgggttacatggtaaagatgtatgttcaggcaagcagagcaacaaaatagagaaagtttggctccctggtgattactgagcctccattccagctctgagctatctatctgtatttctgcatgaaagaaaaaaaatataattctatttcttaagtcagttacatatgtgtgtgtgtgtgtgtgtgtgtatatatatatatatgcgtatatatatgcatatatttctttgagacagagtctcactctgtcacccaggctggagtgcagtggcacgatttcagctcatgcaacctctgcttcccaagttcaagcgattctcctgcctcagcctcccaaatagctaggattacaggtgcctgccaccacacccagctattttttgtagttttagtagagagggggtttggccatgttggccaggctggtctcaaactcctgaccccacgtaatccacctgccttggcctcccaaagtgctgggattacaggcatgagccaccgcacccagcccagttacttatattctgtaagacttccaagcttataagtaatatatggggtcaggagggggcggattatttctttcagttccgacattgtgttagtagaagtccagggtcccctttgcctctccacctccagaggcataaccatggaccactaagcagctctctcctcccaccttccccagttcatcactggagtcatctactgacctaaccatatgtccctgcaaagcattgtatctctgtttggtaagacccaaaagggggtgatctgcctgcctcagcctcccaagttcaagcgattctcctgcctcagcctcccaaagtgctcggattacaggcgtgagccaccgcgcctggccagtgatccttgttttacagggtaagttctgagtgccagagggggctaggaagagcagagccatcttgctctgaaaagtccctgcatacttgtccagccttacccctcctccctctgtgctgcaggaaatattagagaatgtggattctggagtcagctatcggttcaaattgtgatgcgggtgattattaattgagagaccttggccaaactatttaaactctctgtgcctcagtttcccccatatatatttgttataataaagattcttatcttgcagggctgtgagaattaaatgagatagtgttccttaaagtgcttactacagcgcctagcagacagtgagtgagtgctccatcaacagagaggacaaatattgacctgagtcattaaaaggatcaaaggagggccaggcacagtggctcatgcctgtaatcccggcactttgggaggctgaggcgggtgaataacgaggtcagtagttcaataccagcctggccaaaatggtgacaccctgtctctactaaaattataaaaattagccaggcacggtggtgcacgcctgtatgcctgtagtcccagctactcaggaggcagaagtgggaaaatcacttgaacttgggaggcagaggttgcagtgagctgagatggcaccactacactccagcctgggtgaccaaccaagactccatctcacaaaaaaaaaacaaaggatcaaaaggaggaaggccaggtgtgattgatgcataaaaatgaaggagatcttacccagtggaagagaaagcaggtcagggacgtccctaagaaagctgacattaaagctgacatctgaagtatgaatggacatcagtcaggtaaaaaagagaaagtggggaagactcaggaaagcataacagcctgtgcaacggccctggagcaggcgggaaagcatgtgatgtgtttgggaagttgaagatatttttaagatggtggtggatgaggctggagaggtggctaggggctcaatgttgcaaatcagattcctctttgaatgtcatctggatgcctttttccttcatatttatttcacttgggacccctctttttctgtatatcctccttgctggaaagtcacattcttccaacagaaatctcattctcattgatgaaaaattctgcaatgcatcagtatacttgaagactcaaggactcttgtactgtcagacagcaatcctgggtacccagtctttatccacagattcttaaagaggtttccccactctggggcacttgcaaagtgcctggcctaatcgaagccttatacattgaggaaagtcttctctgggtctgatttgagcagtcttgaatgtacttatctccttcggttctgacactaccacctgtagtgattggaggccaatgtggagaagttcgattccattctgtttggagaaaagacttgcttgaggacagaggcctgcagggctggctcctgcctttctccattcaaatcttgggccatcccctgggcttggtggctcatacctgtaatctcccagcactttgggagaccaaggtggatggatcacttgaggccaggagctcgaaaccagcctggccaacatggcaaaactctgtctctactaaaattacaaaaaaaaaattagcccagagtcatggcgggtacctgtaatcccagctactagggaggctgaggcacgagaatcgcttaaacccaggaggcagaggttgcagtgagccgagattgcaccactgcactccagcctgggcaacagagcgagagaaaaaaaattggggcggccattcccccatcacccttcccattggcctcctctccagctacagggattttgttcatgtttgttctatacctgggccaccctttctcactcccccttggtcctacacctttgcccagaaaattctcactcaagcatgtctcctcctccaggaagtcttagtagtggagccgtggcaggttcctttatgttctcaaagaaccggcttctctccttctgtgtgcttatctcagctttcaaatacatattcattcacgtgactgttttgctaatgattgtctccccccagtaaacttaaggtccatgacagcattttttccactatatctgccacaccctggggcatagtaggaagacaataaatgttagcaggaaggagggaagaaagggagagagaaggaagaaaaaaaagaggaaggaggaagagaggagaaggagggagggagggaaggaaggaaggaaggagaggaggagagaatgaaggaagaaaggaaggagggagggagggaaaaggaaagaaaagaaaaggaagagaggaagagaggagggaagaaagaaagcaaggaaggagggaggaagagaaggatggagggaaagaggagagaaggaaggaaagaagaaatgaaggaaggagaggagaaaggaaaaaaggaaggaaggaagaaagggagggaggaggcaggagggaagaaaggaaggaggcagggaaggaaaggagaggaagaaggagggaaggagggaaggaaggaagagggaagaaggaaaaaagggagaaaggagaaagggagggagagaatgaaggaaggaaagaagaggagaaaggaagagagaaggaaaaaaggaaggaaagaagggagggagggagggagggagagagggagggaaggagaggaggagaccttctcgaggtcagtcttttgggggtctgatttcacatagacattttccacttctggcctttcaggttctagaaggcctctacatctcatcaatagattcccttagattcacaatgccccatcagttgatacgttgttgaccacagtggactttcatttcatcgttctgtggagaaagggcctggggcaggcaattctgctgaaacctctcttccagctatcattttctacccaagcaccctttcacatactctctgggattctctcactcgttctttcctatctctttcctcacccctttcttgaacacagaaacatgtttgtgactgttcattgcaagagtaaccaccgttgccatttctgcttgttcgtggaactaacacacaataattattcctctgtcttcatctcctgcctcattaacacctcagtgattacaggcatcattaattgctattaggtcatctcatcccacggtggtgtgaaccaggtcctccctgaagacttggcccagcttatggatagtatcggtttatggccacctcctttcctccaccttcatcatgaaaaagatctgcaacacacacaccacgcagcttccaaaacaccagccggctgaccagagacaacctccttgtggacactaaagaggcggttgtcctggggtgtgacgtgggcctttccaggtcacacaaccagctagtagggatttattaggagtctacatctgctccccaggtcacagatattggacatctcaactagggcacagaaagggatgttggagagaaaaggatgaagtcaagaagtatttagggagtaaaatagaatgcttcctagatgacagaaactcttccaagtgttttagatacattaacccctcatcacactccagtaaagtggatattactatcgcttctttacaaataaggaaactcagccaccaaaaggttacataattcagaatttgagtcactagggtcaggaatccaacccagaaagtctgatttcaaaggatacatttttaccgttgtgctgttgtgccttccattcaattatctgtttgccacagaatgaaaattcctcacttgcatttgcatctcttccacctgcacccctcacaccacacacacgcacgtgcacacacacacaatctatagcgacttggtagggatagaagcaatatataaatggtcaaaagatgcaccacatcagagaacgcagatgtgcagccttgcatgctaaggtgagagagggagaactgcctttgttaccaaacctgcttcagttcccccagagcagctttgacaaactcattcattctgccaaactcatgtgagcttctcaggatggacctagagagtagccaaacatttccttcatttctttttcatggatcccatccttgggccataaaggaagggaaataagaagacttgggagttccagagagctgctgtcagagcccagctgcaacgcttgggagccaagttatttaactattcttaaacctcacttttctccatgcagttgcacagctgttgtcgggattagcatttctatgcttaaaatgctctaagtcctcactcttgtaatcccagctctctttgagaagccgaggtgggaggattgcttgagcccaggaggagttcgagagcagcctgggcaacacagcaagaccccttgtctatgaaaaagaaaaaaaaatgctctaagtgaatgaagagcatctctcaatcctgtgacttaggtaagcgaaggtcagtaaaagaatacgtatcgcacctgaaatataggtattctgtattgactgacagcttccgtgtatactttatataaattttgttttgaaaagtgacatgtgtgatatgcattccttgccttgatgataaatcaaccccccttcttcacagagctgagttgcaagaatagttgcaaatgcaatcaagattttcatcccaatacaacaacaactactactgctggtatgactgctactactaaacgtattcgaattttttaattgtgcgtgcacatggcaacagacacccagaaggaacataaaaaatcagatgaagtaaaaaaaataaagaattatcttggggattgcttgagaaattacagctgcacagctgggctctccattgcattgcaagctcaatggcttgcaaaactttcatactttcaggaagggaaggaacacctggggtgcttggatgtcttcccagattgtggagaacaaaatcctgcctgacaagatgctgtctcatcttgtcgctggcccatggattgtttaccccccaaggaagcccagaatgatgaaaagttgccaaagatctttgagcaacaccacctcctttcaacactgtgatgagctttcacttctttaactcccaacaaaagcaaagggggccccagaggtcaggacctgagattcagagagaagcatgggctggtgacatagatgcgaatatggactccaggcagagaaacagcactgtggctaagaagatgaattcatggatgtgcccagggggcaagcatgaacaatttagatacatggccattctctgatggtgtgtgaaggcagaagatattcaccacgactgtgaactctcaggaaaatcatgcctaggaagcatgagcatgttcagtgaaacatatgcacttgctcttctgcaaaacaacccaagagatttgggctgcttggagacggggagccctcacccacattgactttcaggcttaagatgccattgctggttttgtgttttggttttgttttgttttgttttttgtttttgagacggagtctcgttctgtagcccaggctgaagtacaatggcacaatctcggctcactgcaacctccacctcccaggttcaagggattcttctgcctcagcctcccgagtagctgggactacaggcatgtgccaccacgcctgggtaatttttgtatttttagtagagatgtggtttcaccatattggccaggctggtttcaaactcctgacctcgtgatccatccgcctcagcctcccaaagtgctgggattacaggagtgagccattgcactcggcccattgctgcttttttaaatgagtaatagtatttttattttaatgaataatagtattttatttctttttttgaatttgtcaatttttaaattgacaaataataattgtatatatttatgaggtacaatgtggtgttttcacatatgtctatattgtggaatgaataaaccaagctagtaaacatatcatctctccttttttttcctctaataagaatatttaaaatctactcttttttgaagtctagatatcaccaaaaaaaatttaatgtttaaaaattgaaaaaatatagccaggcatggtggcgggcacctgtaatcccagctacttgggaggctgaagcaggagaatcacttgaacctaggagacggaggttgcagtgagccaagactgcgccattgcactccagcctgggtgacaagagcgaaactccatctcaaagaaaaaggaaaaagaaaatctactctttcagcaattttgaaatgtacaatattattaactatagtcaccatgctgtacaaatcttagatctcaaaaacatataagttctagtgctctaaagcactgtggggtgaccatagctaacaataatttattgtatattttcaaatggctaaaggagaagatgttgaatgttctcaacacaaagaaattatatatgtttgagatgatggatactctaatcaccctgattcgatcattgtacattgtttatatgcatcaaaatatcgctgtactccataaatacatacaattattatgtgccatttaaaaataataacaacatagaaagacacctgcctctagtaaaaaattaaaaaataaagctgaggcgggcagatcgcctgaggtcaggagttcatgagcagcctggcaaacatggtgaaaccccatctctactaaaaatacaaaaattagcctcaaaaataaccccatttctactaaaaacacaaaaacacacacaaaaaatccagcctgtcgcccaggctggagtagctgggatcacaggtcaaatactattcagcctttaaaaggaggaaattctgtcatttgccacatggatgaatttagagagaacattacggtaagtgaaataatccagacacagaaaaacaaatactgcatgatctcacttatacatgagatctaaaaaagtccgactcgtgaaagtcgagaggtagaatggtggttgccaggggctggggcaggtaatagggagatactgatcaaagcatacaaaatttcatattatgttcttttgtttttttttttttttttttgagagacagggtcttgttctgttgcccaggctggagtgcagcagtggtgcaatcatagctcattgcagcctcaaattcctgggctcaagcaatcctcccacctcagcctcctaagtagctgggactacaccactcctggctcatactgtattcttaaggaaggacgtggtattatttccagtttatatctgtagagcatctgtagagtgaaggggcagaagcatcaattctgacaacttcaggcctttgctcccaatgcacattgaacatttttcatgtgtcatgctgggtgctgcgtaaacacaacatgcatggctcacactctcactggctgactgtctttgggagaaagaagatatcaaaggagatttataagagtaaaatgacttcccaggagaagtgcaggcagccacagtaatttggaaccacctggtccatgaagcgttcagcagaagcttcctccagaagcttcgttttacttgagatctgattaatcttttttgtttttttgtttattttactttaagttttagggtacatgtgcacaacgtgcaggtttgttacatatatatatatgtgccatgttggtgtgctgcacccattaactcatcatttaacattaggtatatctcctaatgctatccctcccccctccctcccccctcccccaccccacaactggccccagtgtgtgatgttccccttcctgtgtccatgtgttctcattgttcaattcccacctatgagtcttttaacaaccaagagtccttgtgtcactctccagctctgaattcctcaatggctccccattgcctatttggatcagggaccaccttattcactttgcctaggacttccctggcttcttagcagtgaaatccccacatgccagaaaactctgcagatctgggcaaaccaggacggttggtaaccctacaacccaaccaaattcagactcccttaaagtgacttcaagccccttcatgatctcaccctttcctggaatcacctctcaccatttggactcacttcccatcaccaggactcatctctcaacaaagggactctcctctcatcactgggctcacctctcaccaccagaactcacatctcaccacctggactcactgtcacctcctggattcacccatctggactcacctctcatcacctagacttatctctcaccccctggactcacctctcaccaactagactcatcccttattacctgtactcatctctcaccagctggactcacccacctgggctcatatctcaccacctggactcatctctcactacctggactcacctctcaccacctggactcacatctcaactgaactcatctctcacaacctggactcacaactcaactgaactgatctcttaccacctggactcacctctcaccacctggattcacctctcaccacctggactcacctctcaccaactggactcacctctcactggactcatctcttaccacctggactcacatctcaactgaactcatctctcacctgaactcatctctcaccagctgtactcacttctcaacacctggactagcccacctggactcacctcatctctcaccttctggactcatctctcacctggagtcacctcttaacaccgggactcacctctcacctggacttacctcccaccacttggactcacctctcaccccctagactcacctctcacaccctggactcatatctcaccatctggactcacctttcacctggactaacctctcaacacctagactcatctctcaccacctagattcacctcgcaccactcggactcatctctcacaacgtggaatcacttctcaccacctggaatcacttctcaccacctagactcatctctcaccacctagactcatctcccatcacctagactcatctcccatcacctgaactcacctctcaccacctggactaactctcaccaccactgtctcttacactttattctctggccatgtggaaacagacatggtgccttgcattcaccaagctcactcattcacctctgctatttccccatgttgggacccctctgcactggctacctctcccacatgcccacctgaaaagcacctactcattcctcaagtctcaggtgacatatacctcctctatgaagccaacttgtaaccatgtaaccactttgggagtcaatgcatgcattcctccatggagtccttacaccaggttgcctttcttggaccagccagttgccagataactctgattaatataattaatcaatttaattacttaattagttaactcacaagtactccagcccatggtgacgcattctctcacatactgatactgtgtaaatatgtgtctcatcagaggagacaggatctcccgacatttcatcatcattggactgaggagaaattcatgaggaaccatctctgccaacctccattttaggagacaaaactaaactgggcatcccagtacactcatccacccagttcttccttcttgggccctcactgtgtgcctggttccaaatgaaacactcaagcacagccttcaacccaagaactgggcagtctaaacccacctgcctccacacaggggcaggggctgcctcagaaatgccctttcaatcctgggctaatccaaggctagttcttcccaactctgcattcagtgatgccatgtttgtaacttgaaatcagctacagcaagagtgaatacatcatggaaattagcaacattacaaatgaggacattttttgctttttattgtttgggaggttttttcattttccttcctttttttttttttttttttaacggagttttgcttttgtcgcccaggctggagtgcaatggtgcaatcttggctcactgcagcctctgtctaccaggttcaagcaattctcctgcctcagcctcccaagtagctgggattacagatgcataccaccacacctggcacatttttgtatttttagtagagatggcgttttatcatgttggtcaggctggtgtcagactctgacctccaatgatccgctggcctcggcctcccaaagtgctgggattacagatgtgagccaccacgcctggccatcctctttattttttaattgacacataataattgtacatattcatggagtacatagtgatgttttgaggcatatgacatacagtaatcagatcagggtaattgacatgtcaatcatctcaaacacttatcatttctttgtgttgggagcatgcaatattctccttctagctgtttgaaactatgtaatatattattgtttactgtagttaccctacagtgctgtagaacactagaacttattcttcctacctagctgtattttttggtggggagatagagcgggggacaagggcaagtaaaaatgccataaaatgtttctaccattttgaagttacctttatctttctttttcaatttttattttaaattcggtggtacatgtgcatatttgttacatgagtttattaatccatttttatactctataaagaaatacccaagactgggtaacttataaaggaaagaggtttaattgacttacagttccccatggccggggaggcctcaggaaacttacaatcatggcagaaggggaagaagcacgtcttacgtggtagcaggagagagaagtgaagagcaaagtgggaaaagccccttataaaatcatgagatttcaggacagctcactcactatcacgagaacagcatgggacaactggccccatgatccaatcacctcccacgatgtccctcccccaaacctggggattacaattcagattacaattcaagatgagatttgagtagggacacagagccagaccatatcagtggctacactacatgatgctaaggtttgctgtatgaatgatcccatcactcaagtagtgagcacaggacacagtaggtagtttttcaaccctcaccccctctcctgccctcctccctctagtagtcaccagtgtctattgtttccatcttcatgtccacgagtagtcaatgttttgctcccacttataagtgagaacatgtggtggttggttttctgttcctgcattaattcacttaggataatggcctccagctgcatccattttgctgcaaacgacatcattttgttgttttctttccttttcttttcttttttctttcttttttttttttttttttttgaggcagagtgttgctctatcgcccaggctggagtgcagtggcacggtcttggctcactgtagcctctgcctcctgggttcaagcaattctcctgcctcagcctccccagtagctgggattacaggcatgcgccaccacgcctggctaatttttgtatttttagtagagatgaggtttcaccatgttggccaggctgttgtcaaactcctgacctcaggtgatccacccacctcggcctcccaaagtgctgggattacaggcatgagccacgcaaccagccatgattttgttattttctatggctgcatagtattccatggtatatatacacacaccatatatatatacaccatatacacacatacacacacacacacacacacacatatatatataacacttttctttatccagtccactgttgatgggcgcctaggttgattccatgtttttgctgttgtgaacagcactagctgtaattttgtatcctttaacaaatctctccctatcctctcttccccctaccattcccagcctctaacatcctctgttccactttttgcttttacaaaatcaacttatttagcttccacacatgaatgagaacatgtgctgtttaactttctgtttctagcttatttcacctaacatactgtcctccagttccatccatgttaccacaaatgacaggatttcattctttttatggctgaatagtattgggggatgttgatttgttgtggttttttggcttcattttgtcttgtttttagagagcgaagtgttagacatcttccaacacatcattgcaaacactccgagtcctgactgattcccctaagatccaactttcttaacggaccagaccctgtcaaacaatgagatttcaaggaggaagaagacagcaaaagcatgctttagctaaaattttggcatggggtaagtgtaggatgttatgtccagtttaatttggtgttttcctgggttttgtttctcttttagtgaaaagtgtgtactttttatgccattgcagaattgattcaatagcaccactgaattgtcggtcacgtggatatgttcagtttgaaaaaaattatcaagctgcacatttaagagttgtgcactaggccgggtgcggtggctcatgcctgtaatcccagcactttgggaggccaagagggacagatcacgaggtcaggagttcgagacaggcctgaccaacatggtgaaaccccatctccactaaaaatacaaaaattggccaggtgtggtagtgagtgcctgtaatcccagcaactcgcgaggctgaggcaggagaatggcatgaacccggaaggcagaggttgcagtgagccaagatcacgccactgcactccagcctgggtgacagagcgagactccgtctcaaaaaaaaaaaaagaaagaaaaaaaaagagtcgcgcacttttcttcacataggttattctcaatagttgtttaaagaacacaaaaaaattgagtttgttccatatgtgctaacatggaaagatgacccagacataattcggtgaacaaggcaagtaacaggacaattttgtagaacgggcccacctatgtaactaacactgcgaatgtgtgtaagtcaatgcggcaataggcactgaagggaaattgctcagtcttgtgcctgggctacctggaagcaaagggaagaattggaaggatgagaacaggccagttttgctaaaaaaaacatttctgtattgctagaaagttgcactactaggaatggaattaaaacatgcatcaggctaagcgtggtggctcacgcctgtaatcccagcactttgggaggcccaggcaggtggatcgttttcagctcaggagtttaacaacagctgggcaacatggcaaaacccagtttctacaaaaaacacacaaaaaattagcctggcatggtggtgcacgcctgtagtcccagctactggggaggctgcggctggagaattgcttgagtccgggaagcagaggttgtagtgagttgagatcataccattgcactccagcctgggcaacttagtgagaccctgtctcaaaaaaaaatccacataaaacttgtacataaatatgtataacagcatccttcaaatagccaaaagcctaacacaactgaaatgttcctccacagatgaataaataaacaaaatgaggtatatctgtacaatggactattattcagtcagaaaaagggatgaagttctaatatatgctaccatgtggatgctatcttcctcctccttgaaatctcattgatttataggatctggtcagctaagaaggctggatcttaggggaaggaattggaatgggagtgtctgcaatggtttgctgaaagacatctaacacttggctctctaaaaaccaaaacaaaatgaaacaggagacaacaaaccaacatccctgcaatactgttcttgaaaacatcatgctgaatgaaagaagccagacacaaaaatcacatagtgtatgattctatttctgtgaaatatccagaacagggaaacctgcagagacagaaactcggctagtggttgcctaaggctgggatgtatggagagattgggagtgatagctaaagggtactgggattcttttggggggtgataaaaatgttctaaaatgagccaggtgtggtggcccgcgcctgtaatctcacactttgggaggccgagtggggaggatcccttgaggccagaagttcgagaccagcctgggcaacacagcaagactttgtctctacaaaaaatcttgaggaaaaaagtagcaaggcatgtacgtgcacacctgtagtcccagctgcccaggaggctgaggtggaaggatcgaataagcccaggagttttaagctgcagtgagctgtgatcgctccactgcactccagcctgggtgacagatcttatctccgaaaaaagaaaaaacaaaatgttccaaaatgaactgacgcaatggttgcatcactgtgaatatattgaaacccactggattgcacacttcaggtgggtgaattgtataatacgtaaattatatctcatttaagctgttgctatcgaaccgagtttgttcttcctctgtgcagcaagccaatcaatgtaatgacagattttgcagaagaggaagagttcgttcatgaggcaattaagcgacgaggtggtaaaacaggtctcaaattctcctccccaaaaatagggtttgagggtgcttatgggatagaaaacggggtgatctaaagtacggagaaaggtgactggcaggtagggaaggtgaggtaatcagaatttctgagcaagcatggttgagctacatggctttagataggacatttgtgcaaaaaatagcatttagcatgatctgaaggtggagtttacggccctctgatatcagctacccacataggtgcagttgaagggtcagtgatctccactggcttaaactaaacaagagctgcctcctacctagttcctgaaaaacaactttaagcacccattactatagtgtcccacagacaaaaatgttatctgtaaggaagccagtgggagtttagttatgcattatttggctacgtgacttgctagtggcgcttttaagatcaactataagtaagcaattaaaagtaagtaagcaattaaacgcaaggcagattaagtctggagggcttaatcaggttcgcctttggtttcactattaacataagaaataaaatgaaacaaaatggctgaaaaataataagaggaggaggaagagaggaatcatcatgatgcatcagttaaggcaactgggctggaacattttaggggttgtttgtttgtttttatatttaagacagagtcttgctctgtcacccaggctggagtgcagaggcacaatcttagctcgctgcagcctcaaactcctaggctcaagccagcctcctacctcagcctcctgagtagctaggactataggtatatgccatcatttttattattattattattttagtgacagggtctcactatgccccggctggtctcaaactcctcacctcaagcgatcctcctgccttggcctcccaaagcgctgggactacagacgtgacccaccacacctcaccccttatagggttgaatgccaactgtgccaattgctgaccttgggcagtcatttcacctctatgagcctcagtttctccatctgcaaaatgggagcaaaaatactgatctgtctagactcttgaagactcgatgagataataactaagtgaagtcggtgttatctacacagtggaaggtgagatgaataaactaggcataatgatgatggtaataaccagatgggctggctatgggatgggggttgggagaggttgtggctgggctggcacagacatctgactcatttagactctctgcctaggccacctttgccagagggagtcccctcagccttgcgatcactcatcccattggcgttggctccatttccacaccacagctgtgtgccaagggtgtgtcatgaggtttcttgagtgacagaaaactcaccgacaataaagggccaggtgattgtgccacccgattcatagaccaggcttctcaggagaaaccccgggagattccacactgtcagccccttctccaagatcagtacgtgggcctgactcctcctcggtgcccagctcagtattggcaactaggagagtagtgagattgaacttggccttgaggaacagctgcctctagagttggtaagtgatttggtggatattagcctctctctctctctctctctctctctctcacacacacacacacacacacacacacacacacacgcacatacacacatacgctccctctcccttcatgaattaatgctctggccagttttggcagaatggaagaaatttccatccatcccctctttcttttcatctgttcatttttttcttatttgtttactcagcaaattctctccaacaccacctctgtgctccctgccacactgttggccatgatggagacagagataatgaagtcaggctttcagtcctgaaaactgagctgccagttcagccatgagagtaagaatcaaaaacactgctgtaattcaagtaggagcaagcagagctgtgagagtccagagaaggaagaggaaagttccaggaggtcaagagggatcctaaaacctacctgggtcaccattgctgttaagcacctagagctctccccaggtcctttgcggatgggaaaatcgagtctcagagaggagagtgagatgccgaaggtcacacagctgggaagggactgaggcaggattcggttctggctccagggctatgctccttccacttcctccctcacaatctttggctcctctttcgtcacagcacttgctgtgtgtgtgtgtgagtgtgtgtgtgtgagagagagagagagagagagagatttaatattcatttctgtcacagactagagctacagaaggacagaaagtcagggagcatgtctgtcttacttaatggattctaagtgcataacacataatagatacccagaaaatatttgctgggtaggtgggtgggtgggtggatggattgatggatggatggatggatgggtgggtgggtagatggataagtaaataggtggatggatagatggaagatagagatgatggatgaaggaatggatagaaggagggctagatggagggatagttggaagatagaatagatggagggatggaagacagagagagataatggatgaatggatggatggatggatgaatgaatgagtggttggatgaataagtggatggatagatagatggatgggtagataaatgggttgatggaagaatgaatgggtatatgggatgactgattaatagatgggtagacagacggatgaatagatgtgtgagtgggtggatggatggatggatgagtggatagataggtaagtggaaagataaattggtggatgggttgatgaataaaaggatggatgttaaattggattgatggatgactagatagatgtgcgggtggaaggatgggtggatgggatgactgattaatagataagtagatggacagatgaatagatggaagggtgagtgggtgaatggatggatagatgatgaattaatggatagatggtagatggatagatgaatgaattgatgggtgactggatagatagatggataaaaacatagatgaatggatggttgatgggggaaggcatagcagatattatgccaccaaaattgtcagagaaggatctagatagaaaaaaaaaaagcattcccggtggggtgcagtggctcacatctataatcccagcactttgggaggctgaggtgggcagatcatgaggtcaggagatcaagaccatcctggctaacacagtgaaatcccgtctctactaaaaatacaataaaattagccaggcatggtggcgcatacctgtagtcccagctactcgggaggctgaggcaggatcatcacttgaacccaggaggcagaggttgcagtgagccgagatcatgccactgcaccccagacagcctgggtgacagagtgagattctgtctcaaaaaaaaaaaaaaaaaaagcaaaaagcattccctactgaggagaaagtgtaggaaaaggcaaagagatggggaaatgccaagagtatgacaaaagtctgtctgtgcagccagagaagagaacaggactcagagatgagaatggagaatgtggacagacattcagactcaaggaagagcaagggaggtggattgaccccttcgtattggagacccagtgagataatatcaaagttgcattccccacttcgatgacattctccttttaaacactcctccaaggcatctctttgagatggcttccccagcccgtcatctcctaggtagaagaggcaaacacatgggtcacttgccctgctcctcattccagggctttcaggggaagttcagtccaccagaagctggtgaatgacccacgggagacacaggaagtttttgggggcggagtgggggacattgtggggtaggctcagcagttctgaagaagacatccagaaatggaagacatcgtgaaattgtcattctaggggtgatatattactacttcatggattatcatctattgcccagatctgtccacagaccaaatccccaccacttgagtgctatttggtctcaaaaatccagatacataagccagtttgtcccctgagcccctcggcctccctttagagaactttaacctatcttctcttgactccaaggatcagacaagggtgctgagagccgggactcacaaccaaaggagaaatgagcaatccgcggtctttggaagaggtaggctgggtgcaggttgaggggagggtgatcatctggggagaaggaaggtgaggattttaatgttttggaaagagtggagggactgaaaaaatcatgatctgaactcagagctaggaggtactttgtagtcaatcaaacagcaaaaaaagactcagagatggaaccgaagttgggttgggtggtgggggcagtcaaacacagctacctctgtctccaaagatcaagttcttctcaacacattaaaggttctgagaagtcctgcaataaacaatttcatgttgattttttaaaagatgaagttcttaccactggggtgctcagtacgctgcttctgttctggaaagaactgttgacccccaatattcttcttcctcagacgggatctcagtattagcttcagaaactctgagacctctgcaagtgaggaggtaatagaggaatgctcagaacactcttggggaggatgaggagacctgcaaatccacaaaatacgacaactggaagggatcttcaaaatcacacacacactcattgtctatatttggaaactgaggctcagatgggagcagtgacttcccccaagttcataccaagctagaaaagagctggaccccaggttgggttgctgtatttgggaactaaaaataaaggacacccaattcaatttgaatttcacatcaacaacaaataattatgtagtataagtatatcccatgcaatatttgggatatacttatactaaaaaggtatttggtttttatttgaaatttaagtgtacctgagcatcttctattatacctggcaaccctaagcccaagcctctcttgttttgtttgttcatttttgagacagggtctcacttattgcccaggctggagtgcagtgacaagatcatagttcactgcagcctcaacttcccaggctcaagctatcctcccacttcagcctccaaagtagctgggaccacagatgcacagcagcacacccagctatatttttcattttttgtagagacagagtctcactatgttgcccaggctggtctcgaactcttgggctcaagcaatcctcccacctcggcctcccaaagtgctgggatcacaggcatgagccaccacacccagcctgcatgcctcttttgactacatctgcttctccttgaacctctccatgctgatttctgtcttctcttggccccaggagaaatatgatatgtcaggtgcccgcctggccctaatactgtgtgtcaccaaagcccgggaaggttccgaagaagacctggatgctctggaacacatgtttcggcagctgagattcgaaagcaccatgaaaagagaccccactgccgaggtattggggtgcctactccaggcctgtttgggggaaaggtactaggttggaagtgtaggctatggggacccagctgagtctggttcttcctctcactccagcaattccaggaagagctggaaaaattccagcaggccatcgattcccgggaagatcccgtcagttgtgccttcgtggtactcatggctcacgggagggaaggcttcctcaagggagaagatggggagatggtcaagctggagaatctcttcgaggccctgaacaacaagaactgccaggccctgcgagctaagcccaaggtgtacatcatacaggcctgtcgaggaggtggggacagatccaagagcacagagtctgtggtttgttgtttctgttttgttttttgagacagcacccaggctggaatgcagtggcggaatctcaactcactgcaatctccatctcccaggctccagccgtcctcctgcctcagcctcctgagtagctgagactacaggctcccgccactatgtcaggctaatttttgtagacagggtctgattatgttgcccaggctggtctcaaactcctgagctcaagcaatcctcctgcctcagcctcccaccatgcccaaccaagtctgtgtttttatccaagccagtcccagatccaaagccccagctgaagccaggcaccatggctcatgcctgtaattccagtactttgggaggcccaggcgggaagattttttgaggccaggagttcaagactagcgtcgagcaatgtaacaagaacccagctctatgaaaaatattaaagattagccaagggcatggtggcatgggcctgtggtcctagctactcaggaggctgaagtaggaggatcacttgagcccaggagttaagaggctgcagtgagctatgattacaccattgcactccagcctgggcaacaaagcaagcccctgtctctaaaaagttaaattaaattaaaaagccccactgcacatggcataccacaaaagcatcctttttttttttttttttttagacggagtcttgctctgtcacccaggctggagtgcgatggcacaatcttggctcactgcaacccccacctcccaggttcaagcaattcttctgcctcagcctcccaagtagctgggattacaggtgcaagccaccatgcctggctaatttttgtatttttagtagagatgggatttgaccatgttggtcaggctggtctcaaactcctgacctcaggtgatctgccttcctcagcctcccaaagtgctgggattacaggtgtgagccaccgtgcccagcccttacctttctttttaagaggcgacatctcgctctgtctcccaggctagagtgtagtggtgcaatcatggctcactgcagcctcaagctcccaggttcaagtgatcctcctgcttcagccccccaaaacactgggaatacaggtgtgagccaccctgcccagcccctttccttacctttctctctgactttgcctcctcctcttcttgttgtttcagaacaaagggaccccggtgaaacagtaggtggagatgagattgtgatggtcatcaaagacagcccacaaaccatcccaacatacacagatgccttgcacgtttattccacggtagagggtatgagctcccagctggcccagggatccctctgctcttccccctctcctgccactcccaactcctgaacctctcctccaggacccacgcccttccaggatcccctctacctaccctctgaagctcccccgaacccacctctctggaattcccaggatacatcgcctaccgacatgatcagaaaggctcatgctttatccagaccctggtggatgtgttcacgaagaggaaaggacatatcttggaacttctgacagaggtgagttgacaaaaggtagctgggaccaccgcccaggccaagaagggtgcaggcggagggggctgagcctcctcctaacccctctccatttccctcagctccaaatccaagccagatctcaatacagaaactaagaagcccactttccaacaactttcccaaatgcagggactcttaaaagccacagtatgggagataaatttctataaacaaatcccccttggatataaacaatgtttgggcaaactgttttcttttaatgtttatatgtttttattgcaaattatttaaaaaatgcccagccaaggattccatacaaactatggtataggaagaggccacaacggtctctcatcttaggacaagaatacccacctgccccgttccctaaccctccccccataagtccatgacactgactcctccaagctcaccacacctgttgctgcaggtgacccggcggatggcagaagcagagctggttcaagaaggaaaagcaaggaaaacgaaccctgaaatccaaagcaccctccggaaacggctgtatctgcagtagaagtagaaagaccaggaggagctttccttccagcattctttctgtctcacagaaatttagaggcagctcttacctctccccaagatcttctgttcccaaggccaaatggcacccagtttcttttccatcacacccttcatgcaggtcctcctgtccttattagagcaagccagccaaaacttagcacaaggcatggtggcaacattaacatcacctccctcaggctggactttctatctttattaatgcaaccgaagagacctaagagtgcattcacttatcccactttctgttcctgtggtcttctttctcccatgaagcagaaactggataaagctcaagattttccatagacaaaccaaagcccactcatcccctcctaccccaatccaacctctgctggctcctgcatctcacttggaggtcaaacctcctcctgaggccaatgcattcccaacttccagttctttcctttaccctggagagttagtaaggtaagaaccattctttctctccaaaaccactcctccttggctggcaagttggtgtcctaactccgttctcttcctagctcatggcctctctagataataaagttgtctcctcctttctggatctcttcctcctaacacccctcccctgaaaccctggactctgccctctctccaagaaaatccatctattcaactattcttgcattcaattactctaaatgagagcgtgttggagctatggcaaattccctgttgtcaccttgctattttgcagacaacataatatttaacctctcataaccagagaggttaaataatttgtcaaatgcaatacagtaagacagaggcaaggacaaggtttgacttccagcccagcctcttttccacaacctgctaaatcctgatccatctgaaaacttttctaattagtgaagatgactaataaaaattttccctatctccaaggtaggagctttctggaagtttctagaaattttcaataaccaccagccaaggttacctccaggtaaccttgcagcaccaggctggaagtcagatcggcttcactatcttccaactctacagcctgtatctctccatccccagctttgacctttcctgctcaagtaacctacgggcacatccagcgtcactaaaaactcagggcttttcttcccggttactcctccaagcgttccctggtatcctcaacctcagatcccaggttcagatttctgcagtcaatctatgacccctctcttcttgcatccttcatatgccaccagacaccatgcccagtccagcctgattttgaaacaactttcatgccggtcttctcttccctgacatgttactgtccaggctcaagtcctcagcttctcatatctgcatctttgcaaccaacttcctcccttgcctctctgcttttccatcccacttttcatgtgtcctccataccatctataacagtgatctccctggaacactcaagaagacacaacataccatattatttaaagaccagggtactggacagtggctcacacctgtattcccgactttgagagtctgaagcgggaggatcacttgaggccaggagttaagagaccagcctgggcaacacagcaagaccctgtctctaaaaaaaaaaattaattaactgggtatggtggcacatgcctgtagtcccagctactcaggaggctgaggtgggaggatgacttgagcccaggagtttgaggctgcaaggagctatgatcatgccagtgcatcccagctctaggtgagacagtgagatccggtctccaaaataaatcaatcaatcaaataaagaccaaagtcaaaccgcacatcaggatctctcacacccttccaattttgccatctaccagcacttagctaaacccatctcccatctcttccaccatgaattcactctttcaaaaaggctaatgtcttcttactcacccttgcctctaagcctttgctatcaccatttcccccaagctggagggccctccctctccctttacccctcttccactacctcccacccctactttttccagaaagccatttcctctcttttttctgattgatccttccctctcacccaggattagatgctggaaatgaccacttctggagggcagggaacaagcccttaatctgcataatgagtgttcaataaacagttgtcaaactttgaaagaaagtgttgaaatctttgttctgtgctgaaacagtgaggctgatacaaaaggagttatggatttaatttcttttttcccagtggctggcttcctcccaggtgtgtctatcatgaatggagaatcaggagcttcagcctgtgtcttctttccttttttttttctttaagagatgagatcttgctctgccacccaggctggagtacagtggcaccatcatagctcactgcaccctcgacctcctgggctcaagcaatcctcccacctcagcctctcatgtagctgggactacaggtgtgcatcaccacacctggctaattttcttatttttcggtagagattgggtcttgctatgttgccgaggctggtctcacagtcctggtctcaagcaatcctcttgccttggcctcccaaagtgctgagattacagatgtgacccaccacaccgagctcctgtctctttcacaaaaacagacgtgttgggaatttgtaaagttacaggccacactttcatgctgaatggctatcttttacataattgttccatctccagaatgtttccaaggaagtatgcagacagaaaaatgtcacttttcagaactataagggacattggaggtgggctagttacagcatcaaagacatttagcaagtgtgccatctctctagcctggtgcccatggcagacatgactaatcaatcacacctatttttcctaatgaactcaagtgttacctcaaagcctttctcctctgagcacttgggaagctgacacctgtctactggcataagtacatcattcctgatccatttgaacctccaccttaggaagtcaatcgtctatggtcattttatgtggtacacccaggaatctagccatggcagtaaccggggttttatccatggagatggaaaaccaagtggccaacacaggggtgggttcgaagggccaagagatctggggtgatgcatgcactgagctctatacacttacttacatgccaacctgcggtccaaacacccaatgattctgggagtctccaaacatgagggtcagaaaactgtgtctcactcaccagatccagtctgcagtttgtttttatcaacaaagctttgctggcacacaggcatgtttattcacttacatactggctacggctgccttcaacctacaatggtagagttgagtagttagaacagacagcatatggcccacaaagctgaaactatttactatttggccccttacagagaaggtttgacaacccctatcctaatatctttccaaaaattccaattttgctatcaatactaattttgatgtcaatgacgtatcacctcacacctgttgggatggctattatcaaaaagataggagataagcgttggtgagggtgtggagaaaagggaacctttgttggtggaaaatagaatggtgcagccattgtggaaaacactatggagattcctaaagaaattaaaaacaggctgggcatggtggctcacacctgtaatcccagcacttagggaggctaaggcgggtggatcacttgagggtgggagttcaagaccagcctggccaacatggtgaaaccccgtctctactaaaaatacaaaaattagccaggtatgttggtgggcgcctgtaataccagctacttgagaggctaaggcaggaaaatcgcttgaacctgggaggcggaggttgcagtgagctgagatcgtgccactgcattccagcctgggagacagagtgagacgctgtctcaaaaagaaaaaaaaaaaggaagaggctgggcgcggtggctcacacctgtaatcccagcactttgggaggccgaggtgggcagatcacgaggtcaggagatcgagaccatcctggctaacacagtgaaaccccgtctctactaaaaatacaaaaaattagccgggcatggtggcgggcacctgtagtcccagctacttgggaggctgaggcaggagaatggcatgaaccctgaaggcagagcttgcagtgagccgagatcacgccactgcactccagcctgggcgacagagcaagactccatctcaaaaaaaaaaaaaacagaactacaaaataatcaagtaatcccactcctaggtatatatgcaaaataaaggaaatcaatatatcaaagagatatctgcactgccatgttaattgcagcactattcacaatagccaagatatagaatcaacctaagtgtctatcaatagatgaatggataaagaaactgcggtatatatgcacaatagaatactattcagccataataaagaacaaaatcgtgtcatttgcagcaacgtggatgagcctggatgacactgtattaagtaaaatcagccacgcacagaaagacaaacatcacatgttctcactcattatctggaagctaaaaaagtagatctggtgaagatagagactggaatggtaattaccagaggctgggaagggaagcgggcagaagacgtgaagagaaatgggttactgggtacaaaagtacagttaggtaggatgaataagttcttgtattcgagagcacagtaggaaaattattattaaccgtaattatttgtatatttcaaaatagcaagaggagaagaatagcagtgttcccaacacaaggaaaagataaacgtttaaggtgatggatatctaattaccctaatttgatcaccaccccaaaaatctgtacaactatgatatatcaaataaaaaaacagaactgtccaggcatggtgactcacgcctgtaacctcaggatgccaaggcgggagaatcacttcagcccaggagttttaaactagcctgggcaacaaagtgaggcttagtctctactaaaaaattttttttaattagctaggtgcggtggtgtgtgcctgtagtcctagctacttgggaggctgaggtgggaggatcgcttgagcccaggaagtcaagaccgcagtgaaccgagattgcacctctgtgcgccagcctgggtgacagagcaagatcctgtctcaaaaaaaaaaaaaaaaagaaagaaaagaaaaaaaaaacagaccaccatatgacccagcaattagactttttggatatatatccaaaggaaatgaaattaaatctagtaaagatatcttcactcccatggtcattgaagcattattcacaatagccaaaatgtgaaaaaatcgaagtgtccatctacggacgaatgaataaggaaaagactgtgcgtgcgtgtgtgtgtgtgtatgtgtctgtgagagagagagagagactgtgtgtgtgtgcatgtgtgtgtgtgcgcacacaatggaatgttattcagctttaaaacaaataaataaatgagattctgccgtttgccatcacatggatgaacctaaagtatattatgctagatggaataagccagcattgaaatctaccgttgtattagtctgttctcgtactgctataaagaaatacttgagtctgggtaatgttcaaagaaaaaaggtgaaggcaggtgccgtggctcacccctgtaatcctagcactttgggaggccgaggtgggcggatcacttgaggtcaggagttcaaaaccagcctggccaacacagtgaaaccctgtctctactacaaatacaaaaaaaattagctgggcatggtggcgcatgcctgtaatcccagctacgcgggaggctgagatgggagaatcacttaaacccaggaggcagaggttgcagtgagcactctagcctgggtgacagagagagattcggtctcaaaaagaaaaaaggtttaattggctcagggttccacaggctgtacaggaagcatggccggggacgtctccggaaacttacaatcatggcggaaggcgaagagaaagcagacacgccttacttggctggagcaggcagaagggaggtggagaggtgctacacacgtttaaacaaccagatctcgcggtaacacactcactagcacaagaacggcaccaaaggagaaacctgcccacatgacccaatcacctcccaccagatcccacctccaacactggggattacaatctgacatgagattgagcagagacagacccaaaccatatcaatggctttgttcttcaagacctgcgactaaaggttttccccaattattaagcaaggatgtgtaggtttagcctggaagtttcatattcagcatcaggaactgatccaggctttgtaggacctgtacagttgggcagaaagagtccctctttaagaagaggacaaacagcaacgcagaattagtacagccacataagcacattgtcagggtctctcctcggaccatgcagaggcccagaaaagtggggatcctgtagcttttgccacatcagctccaaggcaagtccccctttgtttatctgttctccaagacgctctccgatagcagcagaaacagtcgttttaaaatgcagatctgagccgggtatggtggtacgcacctgtaagttccagctacttgggaggttggggtgggaggatcacttgagcccaggaagtcaagactgcagtgagctatgattgtgcattgcagcctgagcaacagaactatctctaaaagaataacaataataaatgtgaaataaatctttgaaaatgcaaatatgacctgctgtgcatcttcttaaaatctttctgtgacctcccactgcccttaggataaggaaaaaagtcttaacttctagatccctacatctttttatctctactccttcagtgtttcttttttttattattattatactttaagttttagggtacatgtgcacaatgtgcaggttagttacatatatatacatgtgccatgctggtgcactgcacccactaacttgtcatctagcattaggtatatctcccaatgctatccctcccccctctcccctcccccctccttcagtgtttctgaagtcactttggacttctttcttttccaagataggctatttcctatctcagttacctctacttagatcactcctccaaaccaccttgttatcctttatactgtagctcaaatacatttctgaagggaagtctctttgtccatcacctcagacaagacccgagtttagagttctttgtagactttttctccaagccacaaatcacactttaaaattatgtcttttgcgatatgattatttattcaaaatctggctcttctacctgatggatccaagattaaacatcaattgtcataagccagtgagctttggggtcatgtgttactgcagcataacctaatctgtgctgactgacacatgagaccagccaggttaaaacagcacattggaatgaatgacattcattctaccagctacctaggaaatgtacagaatctatgagataaaaataaatccacttcttttacctatgagcagtttctatttaatcatgtttaaattttattcactaataagaatgaataagcaatttccaaaggttccaaagtgtagcacccagtttagcatgagacacaagaaaaggaaagggagttctagctttgagaatttggaacctgaactcttcaccttcattctgattggtcgggttatgtgggaataaaatatgtcggctgtttgtgaagttgctcttacagatgatcaattataagaatgaggtcaccttcaccctggccaattcagtaagccaatcaccctattgctgtgtatgctcacccacagtccatacccatggcctcaaggctatcttgatacacccagttggcttgctgttagcttctgatagtacaagtcacaagagagagagagaaaatgggaagaggacaaaaaaagaggattcttccttttggagttgccagtagcatcacgtcattccagtttgcaacttttttgccccacacacaaaaccggcatcattgtgccccctgaaatatacgtgcatcagctggccagcagccccgtctcagatatatgcacagatatgcacatggcactgtcttcttcctcttctaagattctagagtctgataacgtcaactcttcccagcgtttcccaggcctcagcttgtcagctgattccacagaaattatttctgggttagcactagtgttaaccaggtccttgttaactagtcttgccttcttgcttttctggtccttcactacctatttaattaattcccatgttaaattctttctgttaaaagacatcagcagatgattgggtaatgaaaatatggtatatatacagaatggactatgattcagccataaaaaaaaaaaagagtgaaatcatgtctcagaaagtcaaatagcacatgtgtattagtccatcctcattctgctaataaagacatacccaagactgggtaatttataaagaaaagaggtttgatggattcacagttccacatggctggaaaggcctcacaatcatggtggaaggtgaaggaggagcaaaggcacatcttacatggtggcaggcaagagagcgtgtgcaggggaactgccctttataaagccatcagatttcgtgacacttattcactatcacgagaacagcatgagggtaactgaccccatgattcaattaccccccaccaggtccctcccatgacacatggggattatgggaactacaattcaagatgagatttgagtggggacacagccaaaccatatcaacatgttctcatttataagtgggggccaaataatgtgtagacaaggacatagggtgtggaattatagacactggagaggcagaagggtaagagagtaggaggagatggaggatgagaaattactttatgggtacaatgtaccttgtttgggtgacggttacactcaaagcccagatttcaccactaggcaacacatccgtgtaacaaaactggccttgtactccttaaatttatgcacttttttttttctttgagactgagtcttgctctgtcaccaggctggagtgcagtggtgcgatcttggctcactgcaatctccacctcccgggttcaagcaattcccctgcctcagcctcccaagtagctgggattacaggcacccaccaccacgcctggctaattttttgtattttagtagagacgaggtttcaccatgttggccaggatggtctccatctcctgacctcatgatccacccacctcagcctcccaaagcactgggattacaagtgtgaaccactgcacccggccccgtgcaaaattttttcaatggtagcttctggaaaatgtcatctataagaaactacaagtagaacacaaataaatgacagaatatgagctttcggtgtctacattccgtaaatctagtaaataataaatattaacatacaggccaggtgtggcggctcacatctgtaaacccagcactttgggaggctgaggtgggcagatagcttgagctcaggagtttgagactgcctgggcaacatggtgaaaccccatttctactaaaaatgcaaaaacaaatatcctgggatggtggtgcatacctgtagccccagctactagggaggctgaggtgggaggatcaccttgatcctgggaggtggaggttacagtgagccaaaatggcactactgtactccagcctgggtgacagagtgagaacctgtctcaaaagataaaaaaataattaacatacaaaaaaattctctctgttaaaatatctttagtcctcccacaacatggataaaccttgaaaacgttatgttaagttaaataagccagagacacgacgcacaaatattgtatgattccactttagaaggtacccagaataggtaagtttatagaggtggaaagtcgattagaagttttcaagagctggggataaggaggaacagggagtgattgcttaatgagtttgagttttatctggggggtgatgaaaacattttggaaatagtggtgatggctgtacaatgttgtgagtgtaattcacgccactgaactgcacactttaaaaatggttaaagtggccaggcatagtggctaacacctgtaatcccagcactttgggagtccaaggtaggtggatcacttgaggccaggagtttgaaaccagcctggacaacatggtgaaaccccatctttactaaaaatgcaaaaattagccaggcctggtggcacacgcctataattccagctactcgggaagctgaggctggagaatcacttgaacctgagaggcagaggttgtagtgagccaagatcatgccactgcactccagcctgggtgacagagtgagattctgtctcaaaaaaaacgttaaaatgtgccacattttcttaatccagtctatcatttttggacatttgggttggttccaagtctttgctattgtgaatagtgccacaataaattaggagacatacctaatgctaaatgacgagttaatgggtgcagcacaccaacatggcacgtgtatacatatgtaacaaacctgcacgttgtgcacatgtaccctaaaacttaaagtataataataataaaaaagtttaaaaaagttaaaacgagtgagattctgtctcaaaaaaagttaaaatgtcaaattttatgttatataatctaccacaatgttttaaaattaattatgtaaaatatcaaaaaccaatgaattatacactttatatgggtgaattgtatggtgtgtgaattatatctcaataaagctgttcaaaaaaataacttgcgtgctttacaatgaagaaaactggcaaaagctacctttaccaaggaaagaaggttaacatcaccaagaaggtcaagtggatttcacgaagctcctgatttgatgtgataaagggccctttcatctctgcagtcttctttccaaaaactcatcaccccaatctaatcatgagaaaaatatctgacaaacctagattggttaacattctaaaggatacctgaccagtcttcctcgagactatcaaaaacgggcagtcatgatggctcacacctgtaatcccagcactttgggaggtgagggcaggaggattgcttgagcccaggagttcaagaccagcctgggcaacctagcgagaatcccccgatctcttccaaaaatctagaggaaaaaaaagactgtcaaaaaatcatgaaaaacaaggaaaggctgagaaactgtcagaccaaaggagactaagaagacaagatgactaaatgcgttgtcagatcctggacaggattctagaaacagaaaaaggacatttgtgggaaaaagggtgaaatatgaataaaacctggagtttagttagtaatactgtaccaatgttagttttgacaaatgtatcccggttatgtaaaatgttaacattaaaagaaaccagatgaaggaacagtgtaggaattctctgtactgttcttgcaacttttctgtaaacttagaattatttcccaaagtaagtttatttagcgctgcaatgaacatgggagttcaggtatctctttaatacacggatttcaatgatttaatcatggcacaatgtaaacatatgttacaatgtcacattgtaccccctaagtgtgcacaattgttattgtcaattggaaataaacaaagtttatctaaaacaaacaaaaaaataactgtggtagttttcattaaccttgattgcaacagggtgtaatcatcattgattaccaagtaggagaaacaaacctaaagtatctaatccatgtaaacgaatttgtcagttgtcatctgttgctattaaatgaatatgatgtaatatccaattggcaaatcataaattttgatttatacttaatttgagaagtgtttggattttgtacctggtgctgggggttagaatagtactgtgtcattcaatagctacaggattctgggtgggtttaggtttttaggcaacatatctattcctttggatagactcttggtgagaagtgggttgaaagagattagggaacagatattgagtatttcctgaccatgcccaacattttcccattgattattctgtagaaaccagcattggtgggaagacagaataaatgatccccccatgcaaaccacggaattaaagaatgtttgcacacccagaaggcacacccctggttgttcacgttgactgtgtatatatccaaatgggatttctatactacagtttcccaaatgttggtcttttacatgcaaacttcgtctcatatctgcataaccctgtgtgattgttccgttaatatttttctttaaaataattctattttctttaattcgaaatgaaactgtctcagaattcaccactatataattcatctatgtaacaaaaaccacttgcacccccaaaagctattgaaattttaaaattgctttaaaaagggaactgttagccaggcgcagtggctcacgcctgtaatcccagcactttgggaggctgaggtgagtggatcacgaggtcaggagatcaagaccatcctgtccaacatggtggaaccccatatccactaaaaatacaaaaattagcgggcatggtggcgcgcacctgtagtcccagctacttgggagtctgaggcaggagaatcgggaggcggaggttgcagtgagctgaggaggcagaggttgcagtcagccgagatcgcaccactgcagacatagtctcaaaaaaaaagtggccgggggggtgggggtggggaactgttatccatacaataaaatattatttggtaataaaaaggaataaagagccaggtggggtgactcacacctgtaatcctagcactttgggaggctgaaatgagagaattgcttaaggccaggggttcaagaccagccctggcaacagagggagacccagtctctacaaaaaaaaaaaaaaaaaaagaagaagaaaacattagctgggtgtggtggtgcctgcctatagtcccagctactcaggagacggaagtgggaggatcacttgagtccaggaattagagggtgcagtgagctatgatcatgccactgcattctagcctgggcaacagatcaataccctgtctcaaaataaaataaaataaaataaaataaaataattaaattgaaaataagaaaaagaatgaaggactaatacaggctacaacctgaatgaaccttgaaaacattatgcgaagtgggaaaagcccattgcaaaaagccacatattacacagttccattgctatgaaatgttcagaacaggaaagtccataaagacagaaagaggccaggcatggtggctcacgcctgtaatcccaacactttgggaggctgaggcaggtggatcacaaggtcaggagttcaaggccagcctgatcaatatggcgaaaccccgtctctattaaaaatacaaaaagtagccaggcatggtagtgcgttcctgtagtcccagctactcaggaggctgaggcaggagaatcgcttgaacccaggaggcagaggttgcagtgagccaagatcgtgccactgcactcaagcctgggcgacagagcaagactccatctcaagaaagaaaaggacagaaagcagattagcagttgccaggggttgatgggaaagaaacgaggagtgactatttaatgactacaggtttccttttggggtgataaaaaaaacttttggaattggatagtggtgatggtgtcacaactctttgaatatatcaaaaaccattgaattgtatactttcgtttttgggggggttgggggggataggttctcactcagctgccaaggctggagtgcagtggcacaatctcggctcactgcaacctccacatcctaggctcaagtgatcctcctgcctcagcctcccaaagtgctgggattacaggtaggagacaccaggccctgcactgaattgaatactttcaaagggtgaattttatggtatgtgaattatacatcaataaagctgttgttttaaaaaaggaaaatgtacctattataaaaggaaagttagtatcacttgccacaataggaaataactgtcacgcgtgtccgtatagaagactacctaaacaggctttgtgtggagcaacaaggctgttgattcacttgggtgcaagtgggctgagtccaaaaagagagtcagcaaagggagataggagaggagcagctttatagggcttgggtaggccgtggaaagttacagttaaaggtagttgtctattgtcagcagaggagggggtcacaaggtgcatggtggagagatgatgggactcattgtccagaagaatgtcacagggttgattgatcagttggggcagggcaggaacaagtcataatggtggaatgtcataaggtgggttaattagttaagacaggaactggctgtttcacttctttgtggtttttcggctgctccagattttttggctcctgcaggccatctagacgtatatgtgcaggtcacaggagttacaatggctgagcttcggctcagaggcctgaccataaccataccaataagaatatacaagtaaagccgggcgtggtggctcacgcctgtaatcccagcattttgggaggccgaggagggtggatcacaaggtcaagagatcaaaaccatcctggccaacaaggtgaaaccccatatctactaaaaatataaaaattagccaggcgtggtggcgtgcacctgtagtcccagctactcgggaggttaaggcagaagaattacttgaatctgggaggcagaggttgcagtgagctgagattgtgccactgcactccagcctggagacagagcgagactccatctcaaaaaaaaaaagataaaaaaaaaaggatatacgagtaaaatcttaagtgttcatttatgatccactaaaagtcatctcgatgtaccaccagtagtgtgagtctcacatactatgtacaaacatttctccaggagtagtatggcttgttaaaagtgtatgagcaattaatcccagcactttgggaggccgaggcaggcggatcacgaggtcaggagatcgagaccatcctggctaacacggtgaaaccccgtctctactaaaaatacaaaaagaaattagtcgggcatggtggcgggcacctgtagtcccagctacttgggtggctgaggcaggagaatggcgtgaacccaggaggcggagtttacagtgagccgagatcacgccactgcactccagcctgggtgacagagcgagactccatctcaaaaaaaaaaaaaaaaagtgtatgagcattttaatttcaatagatttgttcactcattcattgcattaaaataatttatcgaatctctgtcaaataccaaatgctgtactaggtgctagaaatagcatcaccgacaaagacaaagtcattgatctcatggaactgacattgtgtacggaaatgctgtgataagcaaacacatagcactgcaatatatatttttgctagtgctaagtgtcatggagaaaaataaaacatcgtaagtgggttacagaatcatgggagcaagatgcttttttattgtggcaaaatacacataatatcaaatgtatcgctttaaccattgttttttgttttttgttttttgttttgagacagagttttgctcttgttgcccaggctggagtgcagtggtatgatctcggctcactgcaacctccacctcccgggttcaagcgattctcctgcctcagcctcccaagtagctgggattacaggcgcccaccaccatgcccggctaatttttgtgtttttagtagagacggggtttcaccatgttggccaggctggtctcaaactcctgaccccaggtgatcttcccacctcagcctcccaaagtgctgggattataggcatgagccaccatgcccggccgcgctttaaccattttaaaatattcaagcactggcatttagtgcattcacagtgctgtgcaaccaacacctctgtctcgtcccagaatatttttattacctaaaaggaaactctacacccagacagaaggtcatggaggtgacatttgaacgggaatctgaaggaagagcaagtgagcgccatgtcaagatctgatcttctttgcataccaccttcaccccatatcaacaaactcctgtactattatttcgttcatattttcctttaaagcgagtctgtctctttacttaagagtacagttacctgctgggtacagtggctcatgcctgtaatcccagcactttgggaggccgaggtgggtggattgcttgaggtcaggagttcaagaccagcctgaccaacatggtgaaaccccgtctctactaaaaatacaaaaattggcctggcatggtggtgggggcctgtagtcccacctacttgggaggccaaggcaggagaatcgcttgaacccgggaggtggaagttgcagtgagccgaggttgtgccactgcactccagcctgggcaacagagcgagactccatctcaaaataaataaataaacaaataaataaatgtacagttatccatagaatataatattatttggcaatttaaaaaaataaagtaccatctgttattgaaaagagtcaaactctataaaatgtttgaagaaattttttctgagccaaatatgagcgaccatggtccatgacacagccctcaggagatcctgagaacatgtgtccaagatggtcagggtgcagcttggttttatacattttagggagacgtgagatgtagggagccgaagacccgtgggacgtgaccaactcagcattccaccggaggctacgtgatcaaacagcaaactgtgtaccatgaatgcaggatgtgagcaaactcacgactgctcctgccgacagaaggtttgccggaggcaatctctggcgtggaggttatctactgcaacatctagagcctgctgttcgaggaatgcagtcttgcaagcctactctggactgagcccctggactccttcttccaccccgcttctcactatcttttttgcctaataaatacggagggctgtgtaaagctcagggcccttgtccactagaggcaaggtgcccccgaccccttcttccaaatatactcttttgtctcttgtcttttattcttgcgttcgccccctttgttcagtccaccaggggtcgtggtaggttacatagtggtgccccgaacagcgacagaatcaggctctcaacaatgagagcttacctcaatcaatacatgtaaaatgtacactggctcaggccggaaaggcgggacaactggaagcagggacctccaggtcgtaggcggattcaaagattttctgattggcaattggttgaaaagaattattatctaaagacctggaatcaacagaaaggaatgtctgggttaagataagggattgtggagaccaaagttttatcatgcagatgaagcttccaggtagcaggcttcagagagaatagattataaatattatcagacttaaaaaggtaccagactcttagttaattctctcctagatcagggaaaagatccagaaaggaaagaagattccctatgttaggaataacatgttagggaaccctggaggcaggcagatcacctgaggtcaggagttcaagaccagcctggccaacacgacgaaaccctttctctactaaaaaatacaaaataaaaatacaaaaatattagccgggcatggtggtgtgtgcctgtaatcccagctattcgggaggctgagtcaagagaatcacttgaacctgggaggtggaggttgcagtgagacaagatcgcgccactgccctccaccctgggtgacagagcagaactctgtctcaaaaagaaacaagaaaaaaaacaaaaaaattagaatgcagtaccgattcatgctacaatgtggataaacattgaaaacaggcctgcctcagtggctcatgcctgtaatcccagcactttgggaggctgaggcaggaggatcacttgagctcaggagttcaagaccagcctgggcaacatgatgaaaccacatcgctacaaaacatgcaaaaattagcctggcatgatggtgtgcatcttagtcccagctactaaggaggctgaggtgggaggattacttgatgcctggaagtggaggttgcagtgagccatgatcacaccactgcactccagcctgggcaacagagaaagaccctgtcttaaaaaagaaaaagaaaagaaagagaaaagaaagcatgatgctgagtgaaagaagccagacaaagagggcttcatagtgcataattccatttgcatgagtgtccagaatagataaatccacagacgtagaaagtaggttagaggtagccatgggctagggagtgggaatggggagtgactgctcatggggatagagtatccttttgagggggtgaaagtgttctagaactagatagaggtggggttgtacaaccttgtgaacgtactaaatgccactgaattgtacactttaaaaaggtttaaatgatgacttttatattatgtgaatcttactgtgataaaaatatcctgatttctgtgtcccaaaccattgaaagctaaatcttggggagctgggccctgccaccaggcctccacaatatcaaccctagctgccccagtgattccagtaggcagcaagagttgaagtactggggtctagagaccagttcaagcatgcagatgtgtcagggttaatgatattttgtacaagtcctgggccagataacagctgttacaactaaaaggtcaatacacctaagatacaaagatcttctgcaaataagacacaaataacctaaatgtgtccaaatatgcagataatctttgaaatgggcagccacaggtgagaagctctttaaaaaattaaaataaacgggccagacccggtggctcacgactgtaatcccagcactttgggaggctgaggcgggtggatcacttgaggtcagatgttcgagaccagcctggccaacatggcgaaaccctgtctctactaaaaatacaaaaattagctgggcctagtggcacgtgcctgtaatcccagctactcaggaggttgaggcaggaaaatcgcttgaacctgggaggcggaggttgcagtgagccaaaatcgcaccactgcactccagcctgggtgacagagtgagactccatctgaaaataaaataaaataaaataaaaataaaataaaataatgaaaagaggtctttcctgctagtgaagttaaaaaagaaaaaagaaaaagaaaaagaggtcaacttcactatcagccagggaaatgaataccctagaacttaaagtataataaaaatatatatatttttaaaaaaaaagaaaatgagagtaaagatgacttactagttttcactcatcagactggcaatcattcaaaaactaataatgcaatgaaacccagtgcttgcaactatgtgttgaaaagggcacacctgtgtgttgttcgtgggaatgtgatttattattgcatttgggggaagttactagaacaacacctagttgaaattccacactgggaatccaccctatagaacgatatttatcaagggattatttgtagtagcaacaaaaaacaaactataaataacctgtgtgccctcaatggtggaagggttggataatcagagtacactcctatcatgagccattaggtagctattaaaaataatgagttagatatctatctattcgcctggaggaattccatgatgtacgtgctgccaagttttttaaaaaatggataaataagtaggtttcagagaaacatatacagtcatgtgtcacttaatgacagggattctttctgagaaatgcttcattaggcaatttcatcatagtgccagtaacctagagtgagcttacataaacctaaatggcatagcctactacacaccagggctatacgttctagtctattgctcctagactataaacctgtacagcatgctactgtgctgaatactgtaggtaactgtaacacaacagtaagcatttgtgtatctaaacatagaaaaggtacagtaggcctggtgcagtggttcacacctgtaatcccaacactttgggaggccgaggcgggtggatcatgaggtcaagagttcaagaccagcctgaccaatatggtgaaaccccatctctagtaaaaatacaaaaattagctgggcgtggtggcacacatctatagtcccaactacttgggcggctgaggcaggagaatcgcttgaacccgggaggcggaggttgcagtgagccaagatcgcgccactgcactccagcctgggcgacagagtgagattccgtctcaaaaaaaaaaaaaatacagtaaacataagatataaaacaaaaaatgatatatctatatagaatgcttaccaggcttgcagcactggaagctgccctgagtgagctagcgagagagtgatgagtgaatgtgttgctactgtacacttagcatacactaaatgcattttttaattctctttataatcagcacataataattgtacatgtttatgggtacctgtgatgtcttaatacatatgtacattgcataatgatcaaatcaggatagtgagcatgtccatcacccaaatctttatcatttctttgtggtagttacattcaagatcctccgttttctagctatcttgaaataggcaatacaggccgggcacaggggctcacgcctgtaatcccagcactttgggaagccaaggcgggcggatcgcctgaggtcagcagttggagaccagtctgactaacatggtgaaacccccatctctactaaaaatacaaaaattagctggtcatggtggtgggcacctgtaatctcagctactaaggaggctgaagcaggagaatcatttaaacccaggaggcagaggttgtggtgagctgagatagcaccattgcactccagcctgggtgacagagtgagactccatctcaaaaataaataaataaataaataaataaataaataaatacagatgaagatttgtttgcctgccccattgctcacctcctgctgtgtggcccagtccctaacacgccacagaccactaccagtccatggccttgggattgggacccctgccctagttcatgttattttattacagaagacctaagaaaataatatagtatccaattagagagacttgaaatggaaaggatgttcctaaaagaagcctaattgaaattaggatgggaagagagaggaggaaacacccaccctttgcaaaccatataaatgataaagggttaataaccaaaatataaaataaactcctacaactccacagccaagaaacaactcgattgcaaaatcgattaaaaacttgaatagaaatttatccaatgacatgcaaaaagccaagagatatatgaaaaaatgcacatcactaatcatcagggaaatgaaaatcaaaccacaatgaggccgggcgcagtggctcatgcctgtaatcccagcactttgcgaggctgaggtgggtggatcacttgaggtcaggagatcaagaccagcctggccaacatggtgaaaccccatccctactaaaaatacaaaaattaaaaattagcacacacctgtaatcccagctactcaagaggctgagacaggaggcttgcttgaacctgggaagcagaggttgcagtgagcggagatcgcacctctgcactccagcctgggagacagagcataaataaataaataaataaataaataaacaaacaaacctcactcttttcctcacctaacagcaggtccccgagcagatactgaagatgcctcaacccatagccccttggctcacctctgatttcaccttacagcagcagtgggcaatttcacatatgctggtggaagccccgctacttctgtctttactgtctggacatcttctccagcaccgtgggagtgtgctcagcaggggatttaacatccccaagtaccaccctcaacaaataaaggagtcaatggtaaatacccacatacctcttccctcaatggaataattctgaaggtgcggtctatgtgataccccagagagttcccccagcaggatggagccctgtttcctacaaacggaatataatgtgtttattaacatactttatttcctgcttcattttccccacttctgggaccaaataaaccatctgcacccaagtgctttatgattagagcctgttttgaacccaaatcaagactatcagttcccctgggcacagtggctcatgcctgtaatcccagcaatgtgggaagctgagaaaggaggtctagaccagcctggacaacatagcaagacctcatttctaccaaaaaaaattgtaattagcctgtcatggtggcacacacctgtagtcctagctacttgggaggctgaggtgggaggatcacctgagctcaggagttcaaggctgtagtgagctatgatggcactcacagcctgggtgacagagcaggaccgtctcaaaaataaataaaccaaacaccacatgttctcacttataagtgggggctgaacaatgagagcacatggacacagggaggggaagaacactcactggggcctgttgggggagggcagggtggggagagcattaaggaaaagagctaatgtatgctgggctcaatacctaggtgatgggtagatgggtacagcaaaccaccatggtacacatttacctgtgtaacaaatctgcacatcctgcacatgtaccctggaacataaaaacataataatattttgaaaaaactctatcaaaaaataaataaataggattctgctatttattctgctctaaagacccatgcacatgtatgtttattgcagcactattcacaatagcaaagacttagaaccaacccaaatgcccatcagtgatagactggataaagaaaatgtggcacatacacaccatggaatactctccagccataaaaaacaatgagttcatgtcctttgcaggaaaatggatgaagctggaaaccatcattctcagcaaactaacacaggaacagaaaaccaaacaccacatgttctcactcataagtgggagttgaacaatgagaacacatggacacagggaagggaacatcacacaccacggcctgtcaggtggtgtggggcaagggaaggaagagcattaggacaaatatctaatgcacgcagggcttaaaacctagatgatgggttgataggtgcagcaaaccaccatggcacatgtatacttacgtaacaaacctgcacgttcagcacatgtatcccagaacttaaattaaaataataaataactaagtacatataaaaatttaaaagactgtccgttctacttgaccactgccacatcaggagcccttgacccttgccagaattcaggaatccccatctctcctagattctaatcaaggaagaaaatcagggactatataaaaaccttttaggtgttggattttaaaaaaagcatttgtgcttggaagaatgggtggagagtggctgaagcccaagatgctgagagaagaaatctggacctcactcctagagaggatagaatgaagtagaccacccccttcttcctccctcccaatgttcattgatggtttcctggtaccagactcattgccacataaagactctaagattttcccaaagcaatcagcactggactccaaaccaacatgactagaaaactggactctgggagtgtataactggccctgccttataccaatttcccagggggggaaatgttatttttgataacattttctatagagtcatatcaaaaagaaaggcttttttcttcctgaatatatcttttattcctccttatctctcttcactcttccttctataactggtttcagaattcccaggagagttcggatgggagacaccaatgtcctacctaccatggctttgggcaaaataattttttttcagaaccacggacagtggcaaaagtttgttcacccagtgggacttttttttttttttttttttgagatggagtcttgctctgtcacccaggctggagtgcagtggcacaatctcggctcactgcaatcttcgcctcccaggttcaagtgattctcctgcctcagcctcccaagtagctaggattacagatgcccacccaccatgcccagctaatttttgtacttttagtagagactgggtttcaccatttttcccaggctggtctcgaactcccgacctcaagtgatccacccgcctcagcctcccaaagtgctgggattacaggtgtgagccaccatgtctggccaccttatggactttttaggtgggtttttccccaacctttgggctcaaattgattttttttttttttttgagacaaggtctcactctgtcacccaggctggagtgcagtggcatgatctcaacttgctgcaaacttcacctcccgggctcaagggatcctcccacctcagcctcctgagtagttgggactataggcacgtccagctaattttgtatttttagtagagacagggtttcaccatgttggccgggctggtctcaaactcctgagctaaattgatccacctgcctcggcctcccaaagtgctaggattacaggtgtgaaccaccatgcccagcctctgaaaataattttaattttaaaaaaataatgacagtgggattggcacctactcatatccccatatgtccaacgcgaagttggtctaccttgttcttgctttgaagctgacctccccacagagttacgatccaagagccaacagtccaacagccaatattattagggaaagtaattctaatatttactaaagcccctaggagaatttcaacaagtatcctacacacgttctgtgtggctgataggaaggattttttttttaagagacagggtctcactccgttgtccaggttggaatgcagtggtgcgatcacagctcactgcagcctcaacctccagggctcaagtgatcctcccacctcagcctcctgggtaactgagaccacgggcatgtgccaccaatcctggctaatttttttaaattttttgtagatataaggtcttgctgttttgcccaagctggtctcaaacttctaggctcaagggattctccaaccttggcctcccaagtagctaggattataggcatgagccaccgtgtccaactccagtgccaagcaggtgatcaagaagtgtttgataggccgggtacagtggctcaggcctgtaatcccagcactttgggagaccgaggagagcagatcacttgaggtttgagatcagtctttccaacatggtgaaaccctgtctctactaaaaatacaaagactagctgggcatggtggtgggcaccagtaattccagctactcaagaggctgaggagggagaattgctagaacccaggaggtggaggttgcagtgagccgagattgctccactgtgctccaggctgggtgaaagagtgacactccatctcaaaaaaaagtgtttgataaatttatttatttaataccgatttattgattgattgatactcttcggagctttccttaatgagccagtttcttccataatgcaatgaatgaaaggacctctcagattcaggcatctgagtgcccgactggagtctgggaccccccagacctctctgcctgggagcttccatgaagctcagcctgagctggaaggagaccgtagggagatgtcctagtgagagtgaatccctagtcactgtttcctcttcttacccactcgatgatcccaaagcacacccatctccaaaagaacaggtcacatgtggcagaggagaaacaaaataattagcatccgcttccttaacaaggagctatggggacgaagtctcctagagtccccagactataaataccctgatgttcccctggctcccccactcacctgcagagtctgggggcgggggggtacacatatgaatccttcccatagacatcaggctaaccccagcgatcacaggtgagtagcccccatgcccttcctaggggtttagtgctgacctcgggatcctctagcagttggtggagaaggaggcttcccgggaccctccccttggtgatgccatcctggtgagcaggtgagggatggggaaaggattgagctgagggtgggggtggagggttgtgggagaggaatctgtctccttcctagaggccgagagagagagaagagactgagaccaagtctagactctctgagtggacaaagcacgcagacggcagaccctctgtggcaggatatgtggaggaaaagcactgagggtctgcagctgcaggacacctgcacagataggagaggtcttgagaaacaagtttctccaatgcagcagctccccaagtgtggtccctgggctagaagcaccagcatcctctggaaactatctagaagtgctggttcttacaccagacatttcagggaaagggcttagctttttgtgtatgatgagtttgggagcgggggggagggggcggggggattgttttgtttgtttgtttgttctttctgtttttgagacagggtctcgctctgttgcccagtctggagtgcagtggcattatcatagctcatcgcagcctcgacctcccaagctcaagtgatcctccctcctcagcctcccgggtacctgggataacagacatataccaccatgcctggctaattttattttcgtagaggcagggatcttcctatgttgcccaggatggtctcacactcccgggctcaagagatcctcctaccttggccccccaagcagctgggactaacaggtgtgtgccaccatgtccagctaattttttattttgtagagatgggggtctcactgtgttgcccaggttggtctctaactcctggactcaagggattctcccacctcagccttctgagtagctgggactatggaagcatgccaccatgcccagcagattgttttattttttgtagatccagggcgggattgggggtggggtggcctcactttgtctgccaggctggtcttgaactcctggcctcaagcaattctcccacttcagcctcccaaagtgctgggattacaggtgtgagccaccatgcctggcccgctttttgtgttttaacaagccttccaggtgaccctgaagcgtgctcaaggttgagaaccgctgctctatgcaacccaagtcaacaactgaggactgttacaaatatgttgccaggaagggaatcgcagtattctatccagcctagagaaaaccaagcattgcattgcaaaaacctcaagtccaacactaaaaagcctcaaaaagttaacatagggctttgctgaaggcctcttggggttaccaaggagattatgctgctaaccttcctaaaaacccctttcatcggctgggcgctgaaatgatgagattactgggctcacgcctgtaatctcagtactttgggaggccaaggtgggcggatcaccgggtcaggagttcaagaccagcctggccaacaggcttagtagaggcgaaaccccgtctctactaaaaatacaaaaattaatcgggcgtggtgatgcacacctgtaatcccagctattcgggtggctgaggcacaagaatcacttgaacccaggagacggatgttgcagtgagccgagatcgtgccactgtactctagcctaggtgacagagtgagactctgtctcgaaaagaaacacgtgtaaatgcttgtaattgaatatttttcccttgcacgtgttgacagcacagaatttagcttcgaaatgcctcataaagaggtgagagtggccattcttagggaggcagtggagtatgagagtgaaaataagtctaaattcaaaggcgagatcaggcacttgcaagctgagtgcccctggcagctcgctcagccccagtctgctcactgtaaattgtagctaacacaatctccctgtgggagttattgtaagacctatgcattaagaaactggctcctggctggctgcagtggctcacgcctgtaatcccagcactttgagagatcaagccgggcagatgatgaggtcaggagttcaagaccagtctgacaaacatggtgaaaccccatctctactaaaaatacaaaaattagccatgcgtggtggtgctcgcctgtcatcccagctactcaggaggctgaggcaggagaatcttttgaacccaggaggcgggggttgcagtgagccaagatcgcgccactgcactccagcttgggtgacagagtaagactccatctcaaaaaagaaaagaaagaaagaaaccggctcctcatcaggataaatagctaatgcatgctgggcttaataccgaggtgatggcttgataggtgcagcaaaccactatggcacacgtttacctatgtaacaaacctgcacgtcctgcacgtgtatcctggaacttaaaataaaatgataaaattaaataaaataaaaatcatgctgagcagccaatagctgggggaaaaaaaaagaaagaaactggctcctaagaaggtttaacccattacagatatcattattgctgagggcaaaataaaaacacctgtcccagctactaggaaggctgaggtgggaggaacacctgagctcaggaggtacaggctgcagtgagctgtgattgtgccaccgcactgcagcctgggtgacagagtgagaccctgtctcaaaataaattaaattaaattaaatagatcttgtattagataattttgcctaactgtaggctaacgtaagtgttctgagcacattgaaggtgggctaggctaagctgtgatgtttggtaggttaggtatgttcaatgcatttttgacttatatatatatatatatatatatatatatatatatatatatatatatttttttttttgagacagagtttcgctcttgttgccaaggctggagtacagtggctcaatctcagcccactgcaacttctgcctcccaggttcaagcgattctcctgcctcagcctcccaagtagctgggattacaggcatgcaccacaacgcctagctaattttgtattttcagtagagacggggcttcaccttgttggccaggctgacctctcaaactcctgacctcaggtgatccccctgcctcggcctcccaaagtgctgggattataagaatgagccaccacgccaggtctgacttatgacattttcaatgtatgaccccattatcagcctcagaacatctgtacctatcatttcttggtggtgagaacataaaattgactctgagtttctctggtatacaatgcattgttattaactatagtcactatgctgtacaatagatctcttgaattatgcctcccatctaattgaaattttgtattctttgatcaatatctccctaacacccacctcccgcccccagcccctggtaaccaccattctactctgcttctatgagattggccattttaaattccacatataagtgagaccatgtggtatctgtctttctgtacctggctattttatgtaacagaatgtccttcagtttcatctatatggttgcaaatgatagaatttcctcttttttccatggctgaataaatagtattccattgtatattcctaccacattttctttatccattcatcggtttttaacacaaaactgatgttaaagattacatattgttggtggaaggatgaaggggaaggagggttgaggggggaggaaagaaaagagggagatggccaggcgcggtgcctcatgcctgtaatcccagcaccttgggagtccaaggcgggtagatcacttgaggtcaggagttgagaccagcctggccaacatggtgaaagcccgtctatactaaaaatacaaaaattagccagtcatggtggtgcgtgcctgtaatccccgctacttgggaggctgaggcacgagaatcacttgaacccaggaggcagaggttgtagtgagctgagatcgtgccactgaactccagcctgggtgacagagcaagactctgtctcaaaaaaagaaaaaggaaaaagaaaacagggagagaacacaggaaaggaagagaaggaaaaacagaagatggtcaggttccctttactgtatagagtttttgttgaggtttgattctgcttgattttctttttttatttttgttttttgttttttgtttgagacagaatcttgctctatagcccaggctagagagccgtggcacaatctctgctcgctgcaaactttgcctcccgggttcaagctattcacctgcctcagcctctagagtagctgggattgcaggcgcccaccaccacgcctgattaatttttttgtatttttagtagagacggggattcaccatgttggccaggctggtctcgaactcctgacctcaagcaatctgcccgcctcagccttccaaagtgctgggattacaggcgcgggccacttggttttgttttctatgaagctttgctccactgaaggaagcaaaagtgtttatagagaacatccaagttgactatgagcgactccgttagatccttgagaccctgactgtctcaggcatgaatgacttggcttgaggagcaacagaagcccactgaagatggcttgaggttaactgaacacaaaggaatttgatggatttgatggaattttcacagaacagtataggtttccgtgggaagctgggaccagaatggcatctctgacacctggctctgtgtggtttttctccctttttgttcccactagtcacagaccatacatggaaccagaaaagcaaaccgaaatctcagaattcttcctccagggactctcagaaaagccagagcatcagaccctcctcttcacaatgttcctctccacatacctggtcaccatcattggaaatgccctcattatcctggccatcatcacggactctcacctccacacacccatgtacttctttctcttcaacctctcactcgttgacaccctattatcctccaccaccgtccccaagatgctagcgaacatccaggctcagagcagagccatcccctttgtgggctgcctcacccagatgtatgccttccacctgttcgggaccatggacagctttctcctggcagtaatggccatcgaccgcttcgtggccattgtccacccacagcgttacttggttctcatgtgctcccctgtctgtgggctgctgctgggagcatcatggatgatcaccaacctccagtctctcatacacacctgcctcatggctcaactgaccttctgcgccggctctgaaatctcccacttcttctgtgacctcatgcccctgctgaagctctccggctcagacacgcacaccaacgagctggtgatctttgcttttggcattgtcgtgggcaccagcccattctcctgcatccttctctcgtacatccgcattttctggacagtctttaagatcccttctactcggggcaagtggaaagccttctccacctgtggcttacacctcactgtggtgtcactgtcctatgggaccatctttgctgtgtacttacagcccacatcccccagctcctcccagaaggacaaggcagccgccctaatgtgtggggtgttcatccccatgctcaacccctttatctacagcatacggaacaaggatatgaaggcagccctggggaagctcatcggcaaagtggccgtcccctgtcctaggccagaacagttattggatgtttatcatgttccaggatcactgttggctgctagggacacagagatgcatcccatcccctaccctggaggagttcagagtctagctgggaacagagacatggaataaatccttccagtacaacgtgataaatgtgtcataaagagatgaacaaagtgtatgagcacccaaaggaaaggtgtgcattttccccaggatttatcttccccaaaaagatcagaatagcaaggatcaaactggcctgaaattagccctcctggaggatcagccttttaggattgctatgtgaataagagtagttgaaaacaagagacgtagctacactcattttagtattgacaaaggccaggtgtggaagctcaagcctgtgatcccagcattttgggaggccaaggtggaaggatcacttgaggccaggagtttgagaccagcctgggcaacatacagagaccctatctccacacacacacacaaaatcactttagcaagacatggtggtatacgcctgtagtctcagctaatcaggaggctgaggcaggcagatcatttgagcccaggagttcaaggttgcagtgagctatgactgcaccactgcacttcagcagtttgggaaactgagcaagatctgtcactcataggtagatagatagatagatagatagatagatagatagatagatagatagacagacagatagatagagaggataagataagataggtagatagggtggatagataagatatgtagatagatagatagatagatagatagatagatagatagatagatagatatacagatagatacatagatagataggatagataggtaggtaggtaggtaggtcaaccgatcgatagatctatctattgacagacagatagatgattgattgatagatagatcatataagtagatagatgatagatagatagatagatagatagatagatgagataggtaggtaggtcagtcgatcgattgatcaatcgatcaacagatagatgatagatagatggatggatagatagagatagaggaggtaggtagatagatagatagatagataggtagatacagacagcccatgtattagccagtgtttcctaagtgttgtggaagaactttgaaaatatttgcaagtgagattagctcacgtgctgttcgcttagtcagccagcaagcctcagcctcctggggggtcttgagacctccacttgtaactatgactgtggttggggcttactttctcaattcccaacaggcttcctgtctccccacaacccccagtcaaggggactctgatgcagacggtccatcaatcgtagtttgggaacacagaccctagcctagctccaaaatctatgtgtttcctgtgacattcatcgcctgactctgaacccagtatgattctacacgcagggtcagccacagcagatcaggtggcccggggcacttaaaaagttagtgttatgggttgaactgtggctcccaaaaaaagatacgtgggaggccaggcgcagtggctcacacctgtaaactctggcactttgggaggttgagtagggagaatcatttgaagctaggagttcaggaccagcctgaacaacatagtgagatctcatccctacaaaaaataaaaatgaaaaaagaaaaaattacctgggtgtggtggtgtgcacctgtcatcttagttactcgggaggctgagacaggaggacctcttgagccaaggaggtcgaggctgcatgagctatgttcctgccactgcactccagcctgggaaacagagcaaggccctgtctgcaaaagtaataataataaaataaaaaagatatgttgaagtcctaaccccaaggacctcagaatgtgaccatatttgaagatagggtgtttacagaggtcattagattacagtaaggtcattaggttggtccctaatctgatacgactggcgtccttatgaaaaggggagatttggacacaggcacccacacacatggagaccgccacatgaagatggaggcagagattggggtgatgctcctacaagccaaggaatgccagggactgcctgcagaccaccagaagccaggagaggcgtggaacaggctatccctctcagccctcagaaggaaccaaggaatcaaagctgctgacaactgatcttttttttttttttttttttttgagacggagtcttgctctgtcatcccggctggatgcagtggcatgattttggctcactgcaacctccacctcccaggttcaagcaattctcctgcctcagcctcccaagtagctgggattacaggcacccaccaccacgcccagctaattttgtgtttttagtagagatgggatttcactatgttggccagactggtctcaaactcctggcctccagtgatctgcccacctcagcctcccaaagtgctgggattacaagcgtgggccactgcacctggcccaacaccttgatctcggactcttaacctccagaactgtaagacaacaaatttctattgtttaagtcacctagttcatggtaatttttaaatttttttttcttttagagacagacaggatctactgtgtcacccaggctggagtacagtggtgcaatcatagctaaagtgcaacctcacctcaaactcctgggctcaagcaatcctcctgcctcagcctcctgagtagttgggactacaggcctatgccactgcaatcagctatatatatttgtagagacagggtctcactatgttgcccaggctggtctcaaactcccggcctcaagagatctgccctcctcggcttcacaaagtgctgggattgcaggtgtaaaccaccacactcggcctgatttgtggtactttgttgcaacattgctagaaaacaaatgcagttagtttaagaaatgtcagcaacctacaaaacctacaaagtgtcccagtacatcctctcaagtttacaattgaccatgtgttctggccaagggaccctgggctagaactggagaaaaggatgaaggatttagattgcatggattcacttactgggtatcagcatgatgacaataatgatgatgacaaccgagatttattatctgaacaatgctaactcctttatatgcacaatctcaataagtgttaagcaacacccctacaaggtaggtgcagaagtaattgtggttttgccactgaaagtaacagcaggctgcgcatggtggctcacacctgtattcccagcactttgggaggccgaggcgggcagatcacaaggtcagtagatcgagaccatcctgaccaacatggtgaaaccccctctctactaaaaatacgaaaattaggccgggcacagtggctcatgcctgtaatcccagaactttgggaggctgaggtgggcggatcatgaggtcaggagatcaagaccatcctggctaacatggtgaaaccccatctctactaaaaatacaaaaaattagccggacatgttggcgggcacctgtagtcccagctactcgggaggctgaggcaggagaatggcctgaacccgggaggcggagcttgcagtgagccaaggccacgccactgcaccccagcctgggtgacagagcgagactcctcctcaatttaaaaaaaaatacaaaacttagccaggcgtggtggcccacacctgtagtcccagctacttgggaggctgaggcaggagaatggcgtcaacccgggaggcggagtttgcgtgagccgagatcgccccactgcactccagcctgggtgacagagcgagactctgtctcaaaaaaaaaaaaaaaaaaaaaaaaaagtttgtaatttaaaagtttgagcatcactgggctagatgggggtcctgtagataaccgggacccaaataggctttaggtacagagatacaggagaaccagatttggggtgccgctctagccactgtgtccaggagggaaccttcccaaccgccctaaaagctctgaaaactacagttagagaagtggccactaggtggcaataatgtcatttcacaaattggatttaaaacgctttttttttttttttttttttttggtttttggttgttttttttttttccccggaaacttgtattctagctgtgaactggcccaggtccatggcccttaggtgtaatctccccctggaagggcacaacaggtgcaaagtttccatgatgagaaggagcctgtgttgtttaaagaaatcacggagactggtgtggcctgagcccagagtgacagggaagctgggtttgcagggggcccgtggagggcactgggagtaacacggtgtgtggaccacggggagtgggaccatgacaaggtttaaggaggatagggggtggggctgtgcttcagaacgaacctgccagttatccatgccatagatctggagtcagcaaactttttctgtcaaggtccaggtcgtcaatattgtcagctttagggaccttaccatctccgttgcaatgactgaactctgctgctgtctggcgaaagcagccatagatgagacatcaacgaatgggcttggctgtgttccactaaaactttgtttataaacacagaagcttccatttcatatcatagtacatgtcataccttgtagcctttgggtttgttttcaaccacttttaaaatgttaaaactactctaggccaggtgcattcactcatgcctgtaatcccagcactttgagaggccaagggaggaggattgcttgaagccaggagttcgagactggagtgggcaacatagtgagacctcccccatctctacaaaaattttttaattagctgggcatggtggtgcatgcctgtagtctcagctactcaggaggctgaggaaggaggatcacttaagcccaggaggtcaaggctgcagtgagctatgattgcaccaccgcactccagcctgggggatagagtaagaccactgtctctaaaaaacttaaaaaataaataaataaataaaaataaatgcaaaactatttttatttcaagggctggatttagcctatgggccataggttgccaatcctcgtatagatggatgggagtgacaagagttaaggggaccaagaaagaccaaaaagtgagaggtgaagtgggctgaaaaccatcagaagataaggagctggtgccacaggacctttgcaaatgctgttccctcttcctgacccctcctgagtaaattcctgcttggcattgagatttcagcacaaactccacttcctcaaggaagcctcccctaacctccatcccttgcccagctacatcagttgccctaatgttacactcgctatcccctctctcatcatcactcatcattagtgatctcttcatcactgcagtggttttgtggggtcttttgttttgttttgagacagagtcttgctctgtctcccagtctggagtgcagtggggcgatcccggctcactgtaacccccacctcctgggttcaaatggttctcctgcctcagcctcccgagtagttgggattacaggcacgcatcaccatgcctggctaatgttttgtatttttagtagaaacggggttcaccgtgtttgccaggctggtctcgaactcctggcctcaagtgatccacctgcctcagccccccaaagttctgggattacaggtgttagctgctgcacccggcctcctcactgcagtggttttatattagtttgtgtaaccctttgattaatgtctgtttcacccatttgactgagctgggagctgggacctgaaatagtgttatcttgtttatctttgcacctctgtgcccctatgattagtacggtagccactcaatgtatgttttctggccacgcaccgtgcctcacacctgtaatcccagcactttgggaggtgaaggcgggcaatcacctgaggtcaggagttcaagaccagcctggccaaccacggccaacgtgatgaagccccatccctactaaaaatacaaaaattagccaggcgtggttgcacgtgcctgtaatcccagctactcaggaggctgaggcaggagaatcgcttgaacccgggaggcaaaggttgcagtgacccaaaatcatgacactgcactccagcctgggcgacagagcaagactcttgtctcagaagaaaaaaaaaaacaaaaaacactttttttctttattttaatttaatcttattttattttatttattttattttttgagatggactctcactttgtcgcccaggctaaagtgtagtggtgtgatcttggctcactgcaacctccgcttcccgtgttcaagttattctcctgcctcagtctcccaagtagctgggactacaggtgcccgccaccatgcccagctaatttttctatttttagtagaggcggggtttgaccatgttggccaggctggtcccgaactcctgacctcaaataatccacccacctcagcctcccaaagtgctgggattataggcatgagccaccgcacccagccacaaaatatattttctgaatgaatgaatgaatgaggcagtgtgatggaaaggttttaggaataccggatggggcagccaaagtaggctgctgagttggaacaaagatacctgcagtcaaggttaagtgagagatgcactcctcctttgatatccccaaccttcagttatgcctgtcccacactcaggtgccttgtgggactgggactctgctgaaattaagaagccaggggcctcatcccacagagcaaaaccagcaagatggcgggactccttaattcagcaacaacaaaagacagaaaataatctggaaattctctaaaatcttagcaagcatgctggaagaggtttgagccaatcttatccagtaaattttttttttttttttttttgagacagggtctcgctctgtcgcccaggctggagtgcagtggtgtgatcatggctgaatgcagcctcgacctcctgggctcaagcaatcctcccacctcagcctcctgagtagctagggctataggcacgcaccaccacacatggctaattttttttacttttttatagagacgaggactcactatgtggcctattccggtcttgaactcctggcctcaagccatcctcccaccttggctcccaaaccgctgggattacaggtgtaagccactgcacacggcccaagcctatattaagagtacaagaacagaccgggcacagtggctcacgcctgtaatcccagcactttgggaggccaagatgggtatattacctgaggtcaggagttcgagaccagcctggccaacatggtgaagcccccatctctactaaaaatacaaaaactagccaggcgtggtggcatgcacctgtagctccagctactcaaggctaaggcaggagaatcgcttgaacctgggaggcggaggttgcagtgagccaagattgtgccactgcactccagcctgggtgacacagcaagattctgtctcaaaaaaaaaaaaaaaaaaaagtacaagaacacttccttctctccatgtgaaattttattgggtgattcaaagcaaatctggagattcgggaactgaggctcagagacgaaaagtgaccaccccaaggccacatgccagatctggggcagagtgggggaatccagcccaggctggtgtgacctcaaaacccagcctctccctccctcatgatgctggtagcctcccaggtgggtgacttgcccaaggtcacactgcagcttggagcaactcaaggcctgtcccgggaggagggagcagcccctgtgtgggactctggggagtgaaaagcggacaagccagcaggagtggccactttctggaaagtgtaagaaagattcactaagatttgggctgaagttcgcagagatggattgggacaatcctcccaactgtccatttgccaggaacttggcaggaaatggaggtggttttgtttgtgtaaacctttgtggctggggatcccaaaggcatccctcacctttaatgatttgctagaaagactcacagaactcagtaatgttattatactcatggtttattgcagtaaacagatacagattaaaatctgcaaagggccagccacagtggcttatgcctataatcccaacactttaagtgagagatgcactcctcctttgatacccccaaccttcaattatgcctgtcccacactcaggtgccttgtgggactgggactctgctgaggcaggaggatcacttgaagccagaagttcgagatcagcctgggcaacatggccagaccctgtctctacaaaaaattgtaaaaattagccaggcgtggtgatgcacacctgtagtcccagctacttgggaagctgaagtcggaggatcactcagatctaggagttcaaggttgcagtgagctagaattgcacaactgcactccagatgaggcaacagagtaaccccccccccttttttttttttttgagacagcatctagctctgtcacccaggctgggatgcagtggtgtgatcacagctcactgcaatttctgcctcctgggctcaagtgatcctccctccttggcctcccaaagcaacgggattacaggtgtaagccaccacacctggcccccattaaaaaaaaaaaatctgcaaaggtaaaaggcagatagagcagcatctaggagacaccaggcatgagcttccagctgttccctcccagtggagttgtacagacatagacaatgctgaattctcacagccacaatgtgtaacaacaggtgcagagtgttgctaaccaaggagctgacccaagccttggtgttctgggttgtttttgtttgtttgttttttgtttttgtttttgtttttttgaaacggggtctctctctgtcacacaggctggagtgcagtggtgcgatctcggctcactgaaacctctgcctccagggttcaagcaattctctgcctcagcctcccgaggagctgggattataggcgcccaccaccatgccccgctaattttttgtatttttagtagagatggggtttcaccatcttggccaggctggtcttgaactcctgacctcgtgatccacccgcctcggcctcccaaagtgctgggaggtgttctgggttcttattggaggttggccactgtattacaatagttcccgcttcttcatgaggtttcagttacctgctgtcaacagcagtccaaaaatactaaatgaaaaatttgagaaataaacactttgggttgggcatggtggttcacgcctgtaataccagcactttgggaggccgaggcgggcggatcacgaggtcaggagattgagaccatcctggctaacatggtgaaaccccatctctaataaaaatacaaaaaaaatagctgggtgtggtggcgggcgctgtagtcccagctactcaggaggctgagacaggagaatggcgtgaacctgggaggcagagcttgcagtgagccaaaatcacaccactgcactccagcctgggcaacagagtgagactccatctcaaaaaaaaaaagaaagaaaaagagagagaaaaaaaaataaacaattagtaagtttttttgtgggtacatagtaggtgtatatatttatgaattacatgtcatattttgatacagggatgtacacatcagggtaaaatgggtatccatcccctcaagcatttatcttttgttttacaaacaatctgattatgctctgtaagttattttcaaatgtacaattaaattatttttgactacagtcaccctgttgtgctagcaattcatacgtttttggttttgggttttgagacagtctcactccgtcacccaggctggagtgcagtggcacaatcttggctcactgcaacctccacctcctgcattcaagcaattgtcctgcctcagcctcccgagcagctgggactacaggtgcccgccaccacacccagctaatttttttgcatttttagtagagatggggtttcaccatgttggtcaggctggtctcaaactcctgacctcaggtgatttgcccacctcagcctctcaaagtgctgggattacaggcatgagccactgcgcctggccacaactcatacgttttaaagtgcgtgccattctgagtagtgtgatgaaatcttgcaccattccactccatcccagctgggatgtcaatcctccctttgtttggcacatctgcactgtaaacaccccacccatcagtcccttactagccatggcagttatgagatcgacaaaacacagtatagctagggttctgtactacccacggtttcaggaatctaccgggcatcttggaacatgttccctgcagataatggaggatcactagtgtcctgggactaccataacaaaataccacagcctgggaggcttaaacaacagaaatttattttctcatagttctggaggctggaagttcaaggtcaagttacgttggtagggttgttctgtggcttctctccaggccttgtaagtggctggctgttccctgagacttcacattgtcttccttctatgtgtgcacacatctgtatccaaatttcctcttctcgtaaggcactagtcctactggattaggactcaccctaaagacgtcattttaacgtaattacctctgtctctagctccggggtatttctccgccaactcaccatgactgccacagaagtgctgagctctgcccaaacctgaccggtccctccacctgcattttgtctttcaacgaatgggtctgtatgtgcctgcgggtggttaacccaccaggtaccaaaagcacagcgtatcaggcctgcagccaacgagaaagaaaattggaggaagaaaaatacatacatgtggggctgggtgtggcggctcatgcctgtaatcccagcactttgggaggccaaggtcgggggatcacttgaggtcaggagttcaagaccagcctggccaatatagtgaaaccctgtctctactacaaatacaaaaattagctgggcgtggtggcacaggcctgtaagatcgcaccactgcactccagactgggcgacagagagagaccctgaaaaaaaaaatagaaaaagaaaagaaagggaagggaaagggaagggaagggaagggaagggaagggaaagggaaagggaaagggaaaggggaaggggaaggggaaagggaaagggaaggaaaggaagggaagaaagaaagaaggaaagaaagaagaaagaaagaaggaaagaaagaaagagaaagaaagaaaggggaaggaaggaagtagagagagagaaagaaagaaggaaggaaggagagaaagaaagaaagaaaaggaaggaaggaaggagagagaaagaaagaagaaaggaaggagagggagaaagaaagaaagaaagaaggaaggaaggagaaagaaagaaaggaaggaaggaaggaagaaagaaaatacatacatggccaggagcagtggctcacacctgtaatcccagcactttgggagaccaaagaggaagagaagactctatctccaaatacagtcacattctaagggaccgggagttaagacttcaacataggaatttggcaagggactgaaggggacataatttggcccatgggtgtccaatcttttcatttccctggaccacattggaagaagaattgtcttgggccacacataaaatacactaacactaacagatagctgatgagctaaaaatcgcaaaaaaaaaatctcatagtgttttaagaaagtttacgaatttgtgttgggtcacattcaaagccttcctgggccacatgcagcctgtgggtggcgggttaaacaagcttgatttagcccataacagccacatagtatggctgaccatttgtgtgactgaccttagctactcagcctcaagcccctcgagaggtcaaactgacacagtgaggcccaaggcctccaccataaaacacgtttttggcataaactctctggtgtgacctccaggtatacaaagagactctcatcacacaggatactccaccagcttgaaggcaactcttcaggagccagacaagggctagactttactttggaatgtgcaggagagcccagaagcatgggaggaaggaggcaggagctaagcctgatgtgggatctctgtcaaagccctgcccacccagccacctgtcctcacctgatcagccacctctctgcaggctgctcctgcttcctctggtacacccagcctgtagagtctagggggtccacaccagcacaccaggtctgggagctggacatcagataagctttgtttaagagacagggcctcagctgggcacggtggctcacacctgtaatcccagcactttgggaggccaaggagggcagataacttaaggtcaggagttctactaaaaaatacaaaatctagccaggcatggtggtgggcgcctgtaatctcagctactcaggaggctgaggcaggagaatcgcttgaatctgggaggcggaggtttcagtgagccgagattgcgccactgcacttcagcctgggcaacaagagtgaaaaccctgtctcaagaaaaaaaaaaaaagagagagagagacggggagagacagggtctcgctctgttgcccaggctagaggcagtggtgcagtcatagctcattgaagcctcaaactcctgggctcaagtgatcctcctgcctcagtctccagaatagctgagactacaggtgtgaaccaccatgtccagcttggagagctcttggcatggctgcagtggccagttgctgagtctatccctgaggctgtgcaggggcctagccagcaggaaagctccacagccttgcagctgataaacagagaccactctggaggtggcatggagcaactatggacccctcctgcacctcagtttcagctctatagctgtctggccagatttttccaagggtcaatgggaggctctggtcaagcaatgctgtaccactgactgtcacccaggtgagactgtgccctgcctcaggaagctgctttatgctaacagaattcataaccatttcattatatacaatcatcccctctccctccagctcctgaatgctactgtgatggatatctctgggcagccacccctttgctggttcctctgaggtctgacttccagccagggaggcctaggcaggctgaggtattcaccttcttctcctggaagatgccagatagacgcaagcctcaggtgtggaaacaaatgggaatgaccacagcgggtggaggaagcttgggtcctgctccccaaaaccttctctatctcccatcccccaggaactgagcaccccagggagctggtagaatggagatgtagccccacagaaccacgccccatgcccatagccttgaaaacagcctaatttattattccctttgcacatgaaacagaggcctagacagaatgtctgtgtttggagtccaccagaagccaaccttgagacaaggattcaagtatttaggaaataaacaggaaatactgtaagtggggtggatatgtgggagagggaagggaaggaagtcagcaaagagtgtattgataaccaggtttctacagtggacagctggagctcaatcccgtgggtgaacactaggggtcagtgtagaacatgaacctcaatcatccaacacaagggtgagggagctggggtatttatccatcaattccccttgactaccacagaggtgctgagctctgcccaaaactgacaggaaatggtcttttggtctttcaactaattggtctatatgtgtctggggctggttaatccaccaggtaccaaaagcacagcacatcagacctgcagccaatgagaacatttaggggaaagaaaacacacacgtggccaggtgcagtggctcacacctgtaatcccagcactttgagaggccaaggaagaaggatcgcttgaggtcaggagtttgagaccagcctgggcaacatagcaagatcctgtctctacaaaaaaaatttaaaagctagctgggtatggcagtgcatgcctataggcctagccactcaggaggctgaggcaagaggattgcttgaacccagaagttcaagtctgcagtgagctatgatcacaccaatgcacaccagcttgggtgacagagggagattatgtctctaaaaataataaggccaagcacggtggctcacacctgtaatcccagccacttggggggccaaagtgggaagatcacttgagcccagaagtttgagaacagtctaggcaacatgatgagaccctatctccacaaaaaaatagaaaaatcagcctgtggcatggtggcacatgcctgtagttccagttgcttgggaggctgaggcaggaacatcacttgagcctaggaggttgagggtgcagtgagttgtggtagtgccactgcactacagcctgagcaacagagcaagaaaaataaataaaataataataataaagtaaataaaaataacatgaaaataatttttaaaaaatttgagacagagtcttagtcacccaggctggagtgcagtggcacgatcttggctcactccaacctctaccctctgggttcaagcgattcccctgcctcagcctcccgagtagctgggattacaggtgcctgccaccatgcctagctaatttttatatttttagtagaaacggggtttcaccatcttggccaggctagtcttgaactcctgacctcgtgatccacccgcctcagcctcccaaagtgctgggattacaggcatgagccacagtgcccggccatgaaaataaatttttttaaaagaaaagaaaatgggccaggcacggtggctgacccctgtaatctcagctctttgggaggccaaggtggatggatcacaaggtcaggaaatcgagaccatcctggccaacatggtgaaaccccatctctactaaaaatataaaaattagctgcacgtggtggtgtgtgcctgtaatcccagctactcaggaggctgaggcagcagcatcgcttaaaccagggagtcacaggttgcagtaagccaagatcgtgccactgcactccagcctgggcaacaaagcaagactatgtctctataaaagaaaagaaaagaaaatgtacgcatacaggctctaaaatctgtacagcaactagcaaaatccacaggaataagcatacaaacatcattatgaaacttagaattcataaccatttcattacatacaatttgcagataatctgttctcacttatggaaatttctgattgctaagaaagaatcagagccaatggtgaattaaataggctacatgcaggcaaataaagacaacaggaaaagtacaaaaactcaaaaagatttacacaaaataataataataaatatttatgtggtatgtgggtgtcatatgggtggggctaagggttgctctcactcccatgtcagaccccagctcctctgagactctgaaataccccattgggaccttagtcctgcagcctctaccctcaacttgtaaacaggtattgtcttgacccctgacttctttccccattgtcaatagctgcctcaaagacatctgcgcagggatctcatagggaggagggtgcactccacccttttacagactgatgccccccaaacacacatatccaagaaaagtgaacagcacctaggagaactgtatatcaacagttgtataatgagtataccaatatatgcataatgagagtcccagaaggagagaagtgaaaggagcagaaagaatatttgatgaggctgggtatggtggttcatgcctataatcccagcactttgggaggccaaggtgggcagatcacttaaggtcagaaatttgagaccggcctggccaacatgacgaaaacccatctctactaaaaatacaaaaattagctgggcatggtgacaggcacctgtaaccccacctacttgagaggttgaggcaggagaatcacttgaacccagaaagcagaggttgcagtgagccaagaccatgcctctgcactccagcctgggcaacagagtgagactccatctcaaaaaataataataataatatttgatgaaataatggccaaaaaacttcccagaagcccagaattgatgaaagacatgaatctacatatccacaaagctcaacaaactccaagtacaataaacacagagaaccacacaaagacacattaaaaccaaacacacacagcctcctcgtccaggcctcttggacaccccctcctatacagacctccatcacctgacacctgatctcctacctgaatattcagcagtgaacaacatagacaagcatcacttgatcacttggtggagacccagtctggacgaggaggcagataaactagaacaaaccactgggactgttaaattcaagttgtggcaagtgttagaagaaaggaaactgagtaatgtgatactgactagacagaggtggtggacagaaagggtctccctagaaggtgccattggacctaaaggatgagagagaggtggcctcagaagaaccagggcttcccaggcagaaggaaccatgtgtgcaaaggacctgaggcagaaatagcttgatatgaaggagaaccagaaaggaggccatggtgagtgaatgggacagccaaagagatgaggctggaagtcttgtgagaccatgctgggaatctgaattttattctaggtgaggtgagcagtcataggaacactattcagcaggatggtgccacaatctgatttcagttttaagtccactgtgggtaatatatggagaatgaaatgtagggctaagacaggttatattttcccagatggccacaatatctcccaccctacatccacttgtacaatgtcaccttgacatgcctcccatgtagagaggtataatctgtgccccctttccttgaatctggtggcagaagtgacacagcatgacactcaaggctgggtcagaagagatgcaacttcttccttgttcacttttagagggctgggtggctgtctaagaagtctgactaccccaagaccaccatgctggaaggaaacccgaaccacacggagaggcctgtgtagctaccctggtccacagccccagcaacagctggcgtcagttgcaagacctctgagtgaagacacctccagatgactcaggaccctgccattttttagtcaccctctagcctaagtctcccctgtccaaactgaaccacagcatctgtgagcatcatgtaaaccaaaaggtatctcagataagtctcaataaatttagaaagcttattttgccaaggttatggacatgcctgtgacacagacttagaagctcctgacaacataaactagggtagtcagggccactaccttgattcaggtctgtaatcctagctacttggtaggccaaggcgggcagatcacttgagaccaggagggttttttgttttgttttgtttttttgttttgtttttttgagacggagtttcactcttgttgcccaggctggaatgcagtgacacaatattggctccctgcaacctccgcctcccgggttcaagagattctcctgcctcagcctcccgagtagctgggattataggcatgcaccaccacccccagctaattttgtgtttttagtagagaaggggtttccccatgttggtcaggctggtctcgaactcccaacctcaggtgatccgcccgccttggcctcccacagtgctgggattagaggcgtgagccaccgcacccagccgagcccaggagtttgagaccagtctgggcaacatgatgagactctatctctacaaaaagtagggaaattagccaggtatggtgacacatgcctatagtcccacttgctcgggaggctgaggcaggagcatcacttgagcccaagaggctgagactgcagtgagctgtggtggtaccactgcactccaccttggtctagttttatatattttagggagacatgagacagcaatcaatatatgtaagatgcacatgggtttggtctgggaaggcaggacaactcaaaagtagggagaaggcttccaggttataggtggataagagagaaacaattgcattctttcgagtttctgactagcctttctgaatatgcaatttacagagatagtcacttatgccttagtctggcttagtgaaacaaataggtaaggaagcgatcagatatgtgtttgtctcatgtgagcagagggacaattttgagttctgcctgtccttcatccataaggaatttccttgtaggcaaattgtgggggaggtatgtagctttttttttcttttcttttcttctttttttttagacggcatcttgctctgatgaccaggctagagtgcagtggtgcaattttgattcactgcaacctccacctcccgtgttcaagcaattttcctgcctcagcctcccaaatagctgggattaccagtgcccacccaccatgcctggccaattttttttctttttcatatttttagtagagatggagtttcaccatgttggccagcctggtttcgaactcctgacctcaagtgatccgtcgcctcagcctcccaaagtgctaggattacaggagtgagccaccgcgcccagctagcttttttaaccttgtagctatcttacttaggaatagaatgggaggcaggtttgtcctacacagttaccagtttgacttcttccttttggctcagtgatttggaggtctcaagatttattttcctttcacaatcacgacatggttgttttacatcattacgtttggggatggtttgtcaaacagcagtagtaattggaatttggaggtgagagaattgagtggggaaagagtggcatggggagaccaaggaagaagcttggggtggggtgggtagtggggacggtcattgaaacgaatgacactacggcttgcaccaggttgaagcagtacctggcaaggagagagaggatacgtggaggctgcgatttggagacagacccaagagaacttcctggatgccatcacccagagtcccatccagggagggtgggtgaggtggaagacaagggatcgggcctgcgccacgatcgtcacgtcccatcgaagctggagcggatccgggcacccggagcccccattccaacccctcccggccccaggcaactacatctcccagcatcgcccgctcgggccgcgggaaaggggaaaaaaaaaaaaagtttgggccaagcattcccggaatgtgcttcctgctggcgcggggcggggggcgggcggggaggcccgggcggggcggggagggcgcggggcggcgcggccggagcccggggcgcgcactcggctcggcccggcccgggccgcagcatggccgagccgctactcaggaaaaccttctcccgcctgcggggccgggagaaacttccccggaaaaagtcggacgccaaggagcgcggtaagcggagatcggtggggaacagggggcgccgagccccacccggcctgggagcggggtcccagggccccgaggacagacggtgggggggatcagggggagccccccgcaccccgctgcagactggggtgcctccagccaggggagggtaggggtcctggaaggaaggggctgggagggaggggggcgcggaccgttatgtgctgctggccggggatgccagcgctgcgggctccttgggaggcccgggagggggcctcgcccacgacaggaaatggggccgcgactgagggcctggagggtggaggggaggaggggctgggaggccgggacactggggcccagtcgggctgggcaaggggcatcgggagccctggaggcgcaggatgggagatgggaggcgtactcctgcaaaggaaagagaggggcggcccgtcaatcagagtagctgccccctccgcctcccacctactaacagtgacggcaactgcgcctgccttagccccaggaaactgtcccttttatacagatggggaaactgaggcacggagcaattgggtcatgtgcccagggccatcgacttaaacagctctttggactatgctacaaacagagaccctagagggtggacatcagaggtggccagaggaggagttcagcagggtagcaagtaaaaaccttagagaaacagctgcgtgggatagggggacccaggaaggaaggagttaaaggaggaaggccagaccattccatggacgtaccccttccccccaggccttcccaaagattcccaatgttcccagggaagggagaagggacagagatgcccaaacacaaacacacacaggaaacagcccaggacatgagacaggagaggagggagggaaggggaagtcccaaagcattgagcgtggggggtctggcctgggctgagggacaagggcccatcccaggatggcgacagagtttggaagacaggagggagggtaaaaggggcaggggactgggagtgactgtgctgcagggaatagaaaacccagctcctcactcctgagcacgtagtgcctgctgtgggctgtatacttttccaaaaggctcctggaagcctccctggacatggaaatcacatccccccatttcacaggaggatactgagcctcagagagggaagcgacttgcccaaggccacgcaggtgcaaagctccatgccacggttattgagagggtagaggaagtggagactggaacgcagtacctacgggccccaggaagcctgacttagaaccctgaggctgcagggatggagtccccttttgggatgccagggactgagtagggggtgctctaagctgataactgagatcgctagcctgtggctgcctattccaaacaaaacagcaggatccaaggaaccatgacttatcaggggccggccagggccgtacacagcatcccacccactgatcaattgcacagggctgctctgcaggcagtgaggggctgggtgggtctcactccccttgctctctgccaggccacccagcccagcgcccagagcccagccctccagagccagagccccaggctcccgaagggtcccaggccggagcagaggggccctccagccccgaggcatcaaggagccctgcacggggagcctacctgcaaagcctggagcccagtagccgccgatgggtgctgggtggggccaagccagctgaggacacctctttagggcctggggtacctggcactggggagcccgccggcgagatctggtacaaccccatccctgaggaagaccccagacctccagcacctgagcccccggggccacagcctggctcagctgagtcagagggcctggccccccaaggtaagaacaagcttcccatccccttccccaaggtgagcaccagctccacatcccttcccttcagggtagcaccagcctcacactccctcctcccagaggagcaccaacctcacactccttcccttcaggggagcaccagcctcacatccccaccccgtcagatgctcccagaggagcatcagcctcacaccctcctccccgccaggggaacaccagcctcacactccttcccttcaggggagcaccagcctcacccccctcccctaagcccaggttcctggaccctgaagtctgctctccacacaggtgcagcccccgccagccccccaaccaaagcctcccgcaccaagtccccgggccccgccaggcgcctctccataaagatgaagaagctgccggaactgcggcgccgcctgagcctgcgaggcccccgggctggcagggagcgcgagagggctgcccctgcgggctccgtcatcagccgctaccacctggacagcagcgtggggggccccgggccggcagcagggcctgggggcacccggagcccgagggccggttacctcagcgacggggactcaccggagcgcccagctgggcccccatcacccacctccttccggccctacgaggtgggtcccgcagcccgggcacccccggccgcactctggggccgcctcagcctgcacctgtacggtctcggggggctgcggccagcgccgggggccacccccagggacctctgctgcctactgcaagtggatggggaggccagggcccgaacagggccactgcgaggggggccggacttcctgcggctggaccacaccttccacctggagctggaggccgccaggctcctgcgcgccctggtgcttgcgtgggaccctggcgtgagaaggcaccggccctgtgcccagggcaccgtgctgctgcccacggtcttccgaggtaggacatgcggctgcaggggaggaggggcagggacccccaaaccccaccgccaccccccgcagagtgcctagggggctgggctccgggcggaaggtgtggcctggagcagcgaggccagggtacatgaagcttcagagcacacccggctcaggcccccttgtgtcctcagggtgccaggcccaacagctggccgtgcgcctggagcctcaggggctgctgtatgccaagctgaccctgtcggagcagcaggaagcccctgccacagctgagccccgcgtctttgggctgcccctgccactgctggtggagcgggagcggccccccggccaggtgcccctcatcatccagaagtgcgttgggcagatcgagcgccgagggctgcgggtgagcacccaccccaccccaaccctctggcccccagacctcagaccactcttcaggacaccctatgtacagatgccagacccctacccccaggcctgagccactcctagctccaatcccaacctagacaagggcagaaggcgcccccttgactgtagcaccctgggcagaacccatgggtcatccattgatttaaaaacaggatccaagccctcctggggctcagagtctgatgggggaaaagatacgactctagtcattcacaaatgtaaaactataactgggactggagttggggtggggtgtacctagggtctgggagagcttaaaacaaaacctggggtagtcatggaaagcctcctcaaagaagtgtcagtttcctaagtcaaaggagatggcagccaagacaagtagtccaagcagagggtttacaaggccaggttgtcaaggtagttccaacctcccagcccacaatgcccattgctgcctggcccagaattccagtgctcaccccactgggccctgattagtctgtggccccggcaagaagacattcactctctcttcccacccccaggtagtgggactgtaccgtctttgtggctcagcggcagtgaagaaagagcttcgggatgcctttgagcgggacagtgcagcggtctgcctatctgaggacctgtaccccgatatcaatgtcatcactggtcagcatggccccctctcccctgcctgctcacccccattcaatgcctcacttcaaggccttggggctcctctgggacctcagtcctcctatctgaccttgctttcacccacctcctcttcccccttagctgtgccctccttagccttagaagccagtggtgccctgaccagaggggaccctgtgttcacaggcatcctcaaggattatcttcgagagttgcccaccccactcatcacccagcccctgtataaggtggtactggaggccatggcccgggaccccccaaacagagttccccccaccactgagggcacccgagggctcctcagctgcctgccagatgtggaaagggtgagttgggcctggtgggagtgatgggacttgagagtgggctgataccaatagaatgtttcacccatgcctgggcctgagatgggcatgagctggcagcatcatcatatccccaagaaataggtgctattagcatcccacttcatagatttggaaactgaggcccaaagcaggtgacagttgcccaaggtcacacagccaggatgtgtcaaaaatgcaggctgaacgctgatctttcaacctacaagggaggttcctggctgagggaacctagacaagtcccatccctctctgtgcttcaatatcttcatctgtaaaatgagattcatggcagctctgcttttccaatgcttagttgcctttggcttcagtcttccctccaacaaaataggctcataatactaacatctaatgattaatagtcttaacccgaccacatcccagctatgagactgtgaacctgcttccctactctagccaccttagtctcttgcaggtaggtgccacaggggcctgactttgtctgacttacatcctctcaaccctctcccaggccacgctgacgcttctcctggaccacctgcgcctcgtctcctccttccatgcctacaaccgcatgaccccacagaacttggccgtgtgcttcgggcctgtgctgctgccggcacgccaggcgcccacaaggcctcgtgcccgcagctccggcccaggccttgccagtgcagtggacttcaagcaccacatcgaggtgctgcactacctgctgcagtcttggccaggtgagttcatgcccagggcctgcaccaccaatctgagccaggctgctacagtgatgccaccttaagggaccaatcagtgtcttaggcttgaagctacgccccctcatggagtaaactggtacctggttgcctcagcaaccagttcagatccaaccaatctgtctgttttgtctttttttattttcatttttttgtaaagacagggtttctctatattgcccaagctggtctcaaacgcatgatctcaagccatccttccgcctcagcctcccaaagtactgggattataaaccaaatcaccttgccccacagagctgattcatctttttatttttattttttattttttttgagatggagtcttgctctctagcccaggctggggtgtggtggcatgatctcagctcactgcaacctctgcctcccaggttcaagggattctcccacctcagcctcccgagtagctgggattataggcacgcaccaccagtcctggctaatttttatattttaagtagagcagggtttcactgtgttggccaggctggtcttgaactcctgacctcaagtgatccacccatttcaggcctctcaaagtgctgggattacaggcatgcactaccaatcctagctaatttttgtatttttagtggagatggggcttcacggtgttggccaggctggtcttgaactcctgacctcaagtgatccgcctgcctcaggcctcccaaagtgctgggattacaggcatgatccaggcatgatccacagacctgcccctacccatctttgatgcagtcagaggccctgcctcttgacatgccaatcagaggcctagttgcgtaagcaaccagtcctagctctgccagtgaaaacctgaaagggtcgaaggccgctttccacaggccaatcaggagcctagttccctaagcagccaatcagaggtcggctgtcgcctctttctatgacctaccctgtctcccttcagatccccgcctgccccgacaatctccagatgtcgcgccttacttgcgacccaaacgacagccacctctgcacctgccgctggcagaccccgaagtggtgactcggccccgcggtcgaggaggccccgaaagccccccgagcaaccgctacgccggcgactggagcgtttgcgggcgggacttcctgccctgtgggcgggatttcctgtccgggccagactacgaccacgtgacgggcagtgacagcgaggacgaggacgaggaggtcggcgagccgagggtcaccggtgacttcgaagacgacttcgatgcgcccttcaacccgcacctgaatctcaaagacttcgacgccctcatcctggatctggagagagagctctccaagcaaatcaacgtgtgcctctgagccagatgacggggtgggaccccggttagtaaggaccgggcgcccagtggctaaggcggtgccctggtgaccaaggagagccagacctgttgctcaggccgagctcctggttgccagcgagttaccacgggaccagtcgcgtgtatggctgagactcattcccagtttccagggcccggtatttggacactagttgccaagtctggggcctggggattttagggaccagcggttgtgaccatctttcctgagcaccaagggcttccccttttgttgccaaaaaggtagttctcgcgcttgctaggctggcctctcttgcctccccttggccggggcaacaccagttactgtgagcatcaccctggtgtggtgagtcacctctagtcggccctcttgctgctgccaaccaaatcagtattagctttgagcactgcactgtttctccctcccttggacgacacaaagactagcatgaggcactgtttgtggggggcagcccctatcctgggttccagcatggacacaggggtagcctggggcttatagagaaacagctggtttcccctacccttttccggggaagtccccacgattggcctctagtcagcaaatggagataacagagtctggcctttccaatccccatctccttgccccccccttgcccccccccccgaaaaaaattgagcacttaaacccctcccttttggagggggccccctgaagcgtcaggctgggggcagtctggtacggaacatatttattgcctccatgcatgtgtgtgtgtgtctgtgaggactggtgtgcgtggacacgtctgaagcaggcgtgtggggctctttcagggaccacagaggagggagcagtttgcagtgcccagccaccctgaaatccccaataatggtgcctcagtgggccccagagttccagtgggagagtacggttccctcctgtctccctcttcttttccgcacctccatctttgtggataataaataaatatgcacaggttctgagactgagtacttgggcctacatgggccagaggtggtttattcagtctccataagagaggggacaaacggcacagttgggtccgtgaagaggagggtccaagagctcacaagagagcctctctgagatttgacccctccatcccctcctcagggaggttgtggagtcactgggcctcatgggataggcccagggcaagcaatgatgagactccaaaccagctggacacagtccaggggcaggaaggcagccaagcgtcctgacccacaaggccctatacagcaatggagccatcgcggaagtccgtcctcccaatgaggatgttgaccacaaccgggtggccgtctcggcactgctgctgggcatcgtgcagcaccttgaccacctgatcctcgttctcccgtgagagcagcaagccccgggcccccagacccatggctgccttgtgataatctaaaagaagagattaagtcggatagtggcaaggactcagcccaccgcacatgcagccagcccaggagaggaacacaagcccagctgggactgaaacagcctcctgtcctcccaacctcgctgaggccccctcaccagtgtaggccaggccacaggccacgttgctgcccagagagggcacctgctcccgagaaatctgtgtccagccagcatcattccctaccaaggccatcactgggatctacaggaagatgatgaaggcaggccgcagccttcagccccatggcttggccagccagaggacagagacagggatagggcctctgccagagaggaggctccctccccacctcagcccacccctggtgacatctcccagaaccccaggccctaagcttccctcaggccagcccagtcaccttgtgtctgacgaatgtatcaaattcgatgaggctgtagccaaaagctccgtccccaaacaggcaccagacctagtcgggaggggacccaggatggttagggtggatcaggacctagagagcagcaagtctcccaactccagtgcctcacctcagcatctggccggcacagcttggccccaagtgcaaatcctgcaccaactcccagagtcccaaaggcccctaagaggaccaagagcaggtgggtgtgaaggcgtcctgatggatggtgcccactgccccaggcgggggcccttccttaccaggatcgagccagcgcagggggccgcggggctgtaccagatgggcagcagtgcccacgaagtccccgccatccaccaccagaattgagttgtcaggtagcgtttcctccaccagctgcagcacctgcactgggttcaggtgctgggccacaggcatcgctgccttctccctgcgacaggacagcgaaggtcaccagggttggcagcagggtctgccgggaacccccttcccacatccactccacccaggccccaccgaaaggtctgctccttctgccggtcggcttcccgcagctcctccacccagtctggggcccaggtctggccctgaaggccctccactaacttcagcacgaaggaacccacatctcctggggaaggaagaggacacagctgtggggagctggcttcctcctgttcttccagcatcagaggcctcaaaacagcaggaagccagcagcagcatccgagcaggcagacgggaagcaggccaggggtgctcctagaaaaaaaacaggtgaaacaccccagaacctgccagaaccaggggagggcagcccaggtgaaaagggaagacaaggcccaagaaacaagggttaaggagcacaaggcaggtgacaaacccaagctggcctcgtcccctccctccacctccttctgcctgggaaacactcaatgaaaagagctacatccaccaagcacatctctcaaatccaggcacgtggaagcgcacagcgaacgttactgaagtgaactaacaaacagccccgtgatgtatctttcaccaccccatttttcaaatgatcaaatggaggctctgagaaggtgaggctctgccgctgttcatctccagttcaggcctcctcgcttctgtcctggccattttgagcagcccccctggcctccacccagcccccttccggcctgccgtccatggctgctgagtggaccttcccaacacagatgcaacggtgctacttctctgcttaatacaagagtgtcctgtcgcctaggctgcaggggagtcaacatcctcagaatgatgaaccaagttcaagtccaaggggactaaaataaggggaggggagagatacggcaggaagacaggctaaggggccaacgagtgtgctctctgtcctgagggcagtgggcagtgtgggagggaacgtgatcacatgcacgttttcaagcctccctctgtgtccaccccaccatttgttcctacagaagcatctatcaggccgggcgcagtagctctggtctgtaatcccagcacttttgagaggccgaggcaggaggatcacttgaggccaggagttccacgccaacctgggcaacacagtgagatgctgattccacaaaaaaaaattaacaaattagcctggcatggtggtgcatacttgtagtcccagctactcaggaggctgaggtgggaggattgcttttgagcctgggagtttgagggtgcagtgagctgtgattgcactactgcattccagcctgggtgacagagcgagacctcgtctctaaaaaataaaaataaaaaaaatttaaagaaagaagcattcatcagtttgagagccaactatttgtctctggttgactggctacccctagggcaaggtctgggcctcaatcactgtaccaggctcaagccagctgcagcagaaaccaggaggagagggactgggaggagcacatatgtgtacggggggattaaggggctcaccctgcacagcctcctggggcttccagaagatgtctgagttgagcaacatctcttcccgattacgattgacgatgatgatcttgctgctgtggctgaggacacggccataggataggcggaagtcacacacagttcctggtgtgggggacaggaatgcagtaggcagaggccccatgtcgtctaccttacttgatccactgtggtggactggatgcaaatgagtccctgttcctcaccgagtctccctgcacctgtgccacctacagtgaccttgcagctccccacaccccctgaatcgggactggcctcatgacatgctttggccaacaggatagggcagaggcaggttatattttcccagatggccataatatctcccaccctacatccatttgtacaaggtcaccttgacatgcctcccatggagagaggtgcagcctaggtcccctttccttgaaagtgacacaccatgacacccaacaaggaagatatgcagtttcttccttgttcacttttagaggcctgggtggggccaaggaatgtgctctctgtctaagaagtctgactaccctgaggccatcatgctgggaggaaaccggagccacacatagagacctgtgtagttgccctagtccacagcccctccaacagctggcgtcaattgcaagacctctgagtgaagacacctccagatgattcaggacccccaccccccattcctgcagactctacttcaagaagccacacagcctccactcactctcttgaataaccgcactctcctagccccatagttttctcatccttcaccaagtcggccagcccaggctagcctactggaggatgagaaacaagggggccatggagacaggggtgaagaactctatgaccccagctgaggccatcccagacgagctgcagggccagccaatccccatacaggtgagcaagcccagcctggatcagcacagctgccttcctgcctaacccaagtgcagactcatgaatgagcccagccaaaaccacagctaccacctaccttataggtggatcttgagaaatcagaaatgcatttttagccattgagtttggggatggttgttacagggcagtagctatctgatacacctattatgcgtctggttgggttcaaagcgctttatgtgaaaatgtgtatcaagtacaataggtgcccactagaccttcctcctccttcgtgtgaagctgggtaacagggtgagggggttcctgggggaaggagggaaaggaagaggctcaggcccacctgctaggacaatgacatccgccttcttcagggccgcactgcggttctcccggatgtggagggggtggttgcggcctaacagcccccgtgccatccctccaaggaagcagggaacacccaaggtctccacggcagccctgggagtccaggcagagcagaggtcagtgtggccggggcctcccgcctccccaagagcacccgaggactggggactgggaacgtgaaaacaagggcagggctggcgcttctcaccgaagcttgtcggcagacgttggggtgagcagggcctgactccccagcaccatcagaggcctcttggcccggctcaggatctccacacagcgctgaacctggagcgagaggtggggatcaaagggctgtctttttatttatttatttttttgagacacagtttcactctgttgcccaggatagagtgtaatggcatgatctcagctcactgcagcctccacctcccaggttcaaacgattctcccgcctcagcctccagagtagctgggattacaggcgcgtgccaccatgcctggctaacttttgtattttcagtagagacagggtttcaccatgttggccaggctagtcttgaactcctggcctcaagtgatccgcctgcctcggcctccctaagtgttgggattgctgctgtgagccaccgcgtccagccaaagggccgcccttgagtcgccatgagcacccaagattaaggccccagtactgactcagggagagggtcagggggccctctcccctcagggagagggtagggtcctcagacacaaaagagaggcaattcacctgctgcggggaagcctgggggatgtccaggggcagcggtccctcgggctgaggctcccaggctcctgcaaagaggttggccaggtaattctctaaatacctgcaaaagggagggggaagaaaccaagttgccagaattaactaactacaaggattccaggatctgagcaaggaaaggggccgggagaaaagccaggagcaaagtggcatggggacagggtggatgagtgacacctcagggacagacgaaccctagtggccaggtcttcaactgcctgtttgccctcggtagcctctggggtccaccccaactccacgtagccccccagaagcaaggaacgcaggctcagcatgccaggattaagcctgtgggtccaacagatgtgagctcaagtcctggctctgtcacttcctagctgtgcaacttagggcaagtgacttcacccttctgagcttccacctctgtcaatgtaaatatgaacctccctccccaggttcaaggatctgtccacttaggacatgaggcgctttgcatgggagttctgaacactgtcctctcctgcttcaaacagggtcttctcggtctccttgctcactgggccccagggccccaactttcctgaaggacctgtgcagggccctggagacacaaagatagatcctgcccagccctcccctcagggggcgctctatccagcgaaagacagacacatgggcattggcaggaaacagtcggagctcagagtcagaagcctctgctttcaccgttaaggacaggccaagacagcacagaagcagcccaggatggaaccgtgggaagccccgcaagtaaagaaaaggcaagggaggctgaggcaggaggattgctcgaggccaggagttcaaggctgtggtgagctatgatcataccactgcactccagcctgggtgatagagtgaggccctgtctcaaaacaaaacaaaacaaaaaaggcaagataagagatagccttgtgagaggcagcccaagagagaggggcaaggagaacaaggggagggactgactgggaagccagggggcaaagtgcattaagaatgaggctatatgaccaaaatggtgaaacctcatctctactaaaaatacaaaaattagctgggtatggtggactgcacctgtattcccagctactccgggggctgaggcaggagaatcacttgaacccgggaggtggaggttgcagtgagccaagatcgcactactgcgctccaacctgggggacaaagcgagactccgtctcaaaaaaaataaagaggccatagaacaaaatcactactgcctgagctgaccctcaggcgcttcacacacatccggagtacaggagcctgactaccttgtccactgatgatgccccgtgcctgtcctggaacctggcacatggctgccgctcgctaaatgtatggaaaggaagggccaaggacaggcaaagggaagggactgaggggaagggagagaaggaggaagaagaggaagaggaggaggagaagaaaggaaaggaagaagaagaagagaagaggccaggcgcagtggctcatgtctgtaatgtttgagaggccgaggagggtggatcacttgaggttaagagttcaagaccagcctggccaacatgatgaaacctcgtctctactaaaaatacaagtattagccaggtgtggtggcgggcgcctgtagtcccagctactcagaaggctgaggcaggaaaatcacttgaacccagggggaggcggaggttgcagtgagccgagatcacgccactgcactcaagcctaggcaacagaacgaagaatctgtttcaaaaaaaaaaaaaaagaaagaaaaggacaaagatgtgagggaaggaaaggaggaggaaggagagggctcgagtctgggctctgccacttttttttttttttttgagacggagtcttgctctgtcacccaggctggagtgcagtagcacgatcttggctcactgcaagctccacctcctgggttcacgccattctcctgccgcagcctcccaagtagctgggactacaggcgcccgccaccacgcccggctaattttttttttttttgtatttttagtagagatggggtttcaccatgttagccaggatggtctcgatctcctgacctcgtgatctgcccacctcggcctcccaatgtgctgggattacaagtgagagccaccgcacccggcctgggctctgccacttcttagctgtgtgactttgggcaagtgacttcacctttctgagcttcctcctctgtaaatgtaagaatgaacctcccttccgaggttcaaggatcatcctttaggaggaggaaaacggagaggacgatgggaaaggtggtgggggaaagggaggagaagaggaaggaagagggaggaggaagaggaggaagaagagatgatggaggaggagaagaaagggaaaaggaggaggaggagggctgtcctgagcctctcccctttgctgcctccacgagggccgccttgctttccctacccacccagttcattcctgcctcaggacctttgcacatgctgttccttctacctggaatgctctccccccagctgtctcctcccagtccacatgtgaatcaaaggaggatgggtgtgggctggaagctgcaggagagaacgggggataaaggagggaatggcaggggtggggctattcaccaggagaccactcggcccacgaggcccttgggtggcttggctggcaccatctccttctggaccatgaagtaggggtacagcacgtcaacgggcagctccacaaacaccggacctgcagggacagggaggacgctgagtccataacatgtccccagcccctcggccccagcactgctcagcatcaccatcctccacctacctggggtgcccgactgggcggcagccatcgcggccctcagggtgggcacaatgtcccgcaccctccgcacagacacacaaaacttacagagtggccggaaaagggacagctgatcaacagcctggagcgcaccccggttctggcaaagacagaggtgtggcagggttatcgcatgagcccttcaagcccccctaggcccccactggcccccaaggactgggtacctgcagcagagtgctggcagccccacccagaagcaggattggggactgagccatctgagcattcttcaccgcagtcaccgtgttggtgaggccagggcctgctgtcactgccgccacgcccaccgtccctggaacacagagcccatcacagccatgcccactctcttggccattcttccacctctgaaaaacccctaccctcacagacactctagcccacagtccaaccagtccccagccctctctgcaatgccctcaccggacaggcgggccatagcatcagcagcaaagacggccgtgacctcatggcgtgtgtccaccacacggatgcccagtttctcacaggccaccagcagcggggaaatgtgcccaccgaccagcgtgaagatgaaccgcacaccatgggccctcagcacagcggccacgttctctccgccatgccggacgcttgccttgtccacctgggcccaaggacaggtggagcaataaagttaaaggccagggcagagggcagctgggaaagggggcaatccccctgccccaggtaagggggcaggagcagggtgagaggtcaagagaagcttggtcttggttaggcatatattatactacatgccaggctcaaaccaaggcataacatcttatcagatcctcttgtcattacatccctcttacagctgaggacatcaaggcttgcccaagtaagactgaaagttcaatagaacccacgctcttaagtgccccactgttacactgcctgtctccaggatggcagggcaatcagggagagaggagagggttatataacccagggggtttggccaggggcacaacgcacgcagagcagatggcagggagccatctgctgtgactcctccctgccctccagtatccttgcagagcctggcagctgggctcctgatcccagcctccctgatgccctcctgatggacgctaaacaggcccagggcttagttgacaggctgccagccaccatgtgcctggcacgggagtgagctgctggcacagactgtgccgaggcctcccaactccagctgcctcacagccctacacatccaaggcttgctttaaatctcctaagtcctgaaggtcagtggcatcactcctggctagcagaggaagcagtagagaagggtttggggagggagaggtcaagcttggtccctgctaggagagaaagggttgaggaaggggtctggagaaggggtaaatttcaaacagaggtgcaaggagtttagggggacacctgtggggtcagctctctccaaacatgtcacctagggcaaaccaccacacaatctctctgagcctcagcttcctcttgcagaaaatgaagacagaaagaacagcacctactttcaaggaaaaggtaaggggtaggtaagaaagtctacagtactgagctcagcagagggcaactgttatgaaactgtcactgccaccccctcgctggagcctgccctctgccccatttatcccatccaggttagggagcacagagtgctgtccatctgttctgtgaaaagagtcactggggaaggaggtaggtggggtgcgagtgccccggcagcggcagcttccgtgttctctcttaccagtggcaaagtccaggcctccatacacagcgtggcaatggagacagggccctggacagaacctcttaccagtccctctggactagtcggggctcgctttcccaccctgcacaatgagtgagctggaagcagcaccacgaggcccctccctctttgactgcccccagcccacctcccattctgtgccccgcaccttgtgcagcagctgatagaagagccccaggcggtgagcggcgcccagcaaggcggccaccagcgtcccgcaggccaggagcaggaaggaggggaataagctcccagcgggggcggcggccgcgggggtctccatgaggtggtacctaagagagaaagggcacttcccagacttgggcgcgacagggaacctctccggaagaaatcgcgccccttctcgcagcaggatccagggccacgacccttgccgccagtttctgtgcggccacgcccccaaccctgccagaccacgccctttgtgcgcctaggctcggggtgaagccatgcctctccgtgacaaggtcacgcccctcgcggggctagccccagtcctttacatcaccaccactcccacccaaactagccaccacaagtcaaggtggcgacgacagcaccacacagttatcttccacttacctacttgtcaatggacaggcggaagccccgcctctctttccacaaccggaccccaaatctcagccccagtagtgagcccgccccatgttacgtcaccaagaggcacgaggtcacgcccccgggttagcgggcgcgaccctccacgcaacccacgcctctcccttaaagagcgcacgggcccgagcctgatccccgaccccgggccaggctgggtcgaggtcacatcgcatcaggatgtggttctcccacaccagctcgacccccgacgctattcaccttcacctccaggatatggcgctgcctccagcagaattcggccccctccgtgtcacgtgacccgggagcgtggccgtgcccgggtggcccacttggctcagcggcgccccgtagtccggcccgatgcgcatgcgcacagtcggagccccgctccggggccacccgaaagagccttgcctctactggccgcctccctcatagaccccgcctccccttgcctttcattggctcgcactgcagacctcacacccattttatgttttaaaaccaggaggccacgcccctcagcggcttcaggagcccagacctttgggggcccaccttccgcagctttccattggccccacggtggaagcccgtaggttcaggccctccgaacacagctcgctttccacaccagcggggccgtaccagagcaagaccatgtctcacaaaataataataatacttaaaaaatggtaaattttatgttatgtatattttccacactataaataaatatttgtgcatgtatatatatatatgtgtatattttttgtataataggtatagtagtaagcaaaggaaattcacactgagtcacattctacaaaatgcctaaccagacctctacaaaactgtcaaggtcatgaaaaacaaagactgaggcactgccacagactagaggagggaaaggagctgtgacaactaaattcaatatagtaccctggactggatccaggaatcaaaaaaaggacaaatttgtggataaagttggtgaaatccaaataaagtttggagttgagttagtagtaatgaaccagtgttaatctttttgtttcagtaaatgtattatggttatataagatgttagcattcagggaagctggataaagagtagacaaaaattatcttgctatctttgcagcttttctgtaaagctaaaaaagaaaaaaaaagtcttaataacaaggatacaattttccagagagagagaaagatgttgtaatagatgtaaattctttcttgggagacaaagctttaacatgctccaagactaattatctgaccaatctctccccagataaagaaagattgtcactaggcaaatgtccaaaaagcttctcagccgaaagctggattattcaacagtccctgaaacaaatatacacagaggacaagtgatttttttaaaaagggaaacaagcctggcatggtggtccatgtgtgtaatcccagcactttgggaggccaagacaggaggatcgcttgaggccaggaatttgagaccaaccggggccaaaaagtgagacccagtctctccaaaaaacaaacaaacaaacaaacttagccaggagaatcgcttgaacccgggaggtggaggttgcggtgagctgagatcacgccattgcactccagcctgggaaacagagcaagactctgtctaaaaaaaattttttttaaaagaaaaaaaattagctgagtatggtggcacgtgcttgttatcccttttgcttgggaggttgagaagggaggattgcttgaacccaagaggttgtgtctacagtgagctgtgatcgtgccactgcactccagctggggcaacagagcaagaccctgtctctaaaaaaaagggggtgggtgtggggcaggggaggaaacaaataccatgtatctaaattgatcgaaatttaaagagaagtgcaacaaattattgagttagagggatacagtaagggcctctcttaggacaagcagaaggactctctaaggaggtgacagttgagcagagagaccaggaggaagtgaggacatgggccccacaaggatctggagaaagagtaatccaggtagagaagatggcacatgcaaaggccctgaggtgttttattaatttcctttgatggccataacacattaccacaaattgggtggcttgaaacaacaggaattaattctcttacacttcgggaggccagaaattcagcatggaggcatcagtggggccatacactctctcgagatctttggggaggatccttaccttctccaacttcaagaggctccaggcattctttggcttatggctgcgtcactccaatttctccgtatatcttcagatggccttattccctgtgcctgcatctccttctgtatcttttttttttttttttttgagacggagtctcactctttcgcccaggctggagtgcagtggcgcaatctcggctcgctgtaacctccacctcctaggttcaggcaattctcctgcctcagcctcctgagtagctgggattacaggcacacaccacaacacccggctaaatttttttgtatttttagtagagatggggtttcaccatattcaccagagtggtctcgaactcctgacctcaggcaatccgcctgcctcagcctcccaaagtgctgggattacaggcatgagccatcgggcccggccctcctcctctacgtcttacaaggatacttgtcattgcatttagggaccaccctcatccaggataggctcatcttgagacccctcacttaactacttctgcaaaaacacattttccaagttaggtcacatttgcacgttctgaatgtacattttagggtctgtcattcaactcattacaaatgggatgggctttgcatgtgcagagaaagtcaggaaagccaggatagctagaaggaagagagcagaggaggcagggaggagacgctatcaaaggctggacaaaggccagacaggtatgattttacagactgcatgaggactgcaaattttattctaagtgaattggaaagccagagaggattttgaacaatatgcaaccacacacaatctgcacatgattattcataggtgctttagttgcaatagctgaaaactggaaaaaataacaaaaaacaacaaaaaaaatatcccttaagagaggaatggttaaacaaactgtgattcacccataccatgaaacactgctcagcaataaagagggcaaactactaaaacacgacaggccaggtgcagtggctcacgcttgtaatcccagcactttgggaggctgaggcgggtggatcacctgaggtcaggtgttcaagaccagccagaccaacatggtgaaaccccgctctactaaaaatataaaaaactagctgggcatggtggtgggtgcctgtaatcccagctactcaggaggctgaggcaggagaatcacttgaacccgggaggcagaggttgcagtgagctgagatcgtggcattgtactccagcctgggtaataaagcgagactccatctaaaaaaaaaatatatatatatatgtatgtagtcaggcatggtggcatgcagctgtagtcccagatactggaggctgaagcaggaagatctcttgagcccaggagtttgaggctgcagtgagccatgattgtgcaactgcactccagtctgggagacagagcaagaccctctgtcttgctaaaaacataaaatacaacaaaacagaaaagcaaagaagcacgcaacactttggatgaatctcaaaataagtagcctgattgaaagaagccaatcttggccgggcgtggggctcatgcctgtaatcccagcactttggaaggcggaggcgggtggatgacctgaggtcaggagttcgagaccaccctgaccaacatggtgaaaccccgtctctacaaaaaacataaaaaattagccaggtgtcgtggtgggcgcctataatcccagctactcaggaggctggggcaggaggatcacttgaacccaggagacagagtttgcagtgagccaagattgtgccattgcactccagcctgagcaacaagagcaaaactccgtctcaaaacaaaaagaaagaagccaatttcaaaggtaccattaatatgatccatttatatgatattctccaaaagtgacaaaaccatactatgggaggaaagatcagtgttgccaggggttagggaagggtgttagaataaagggggtagcatagaaggttttgggggtgatagaactgttttgtattatggtggctgcatgtgttaaaattctaattatgatagtggttacctatgttaaaatttttattgaactgaactctaaaaatttcaattttactgcatgatcctttaaaaactaaaattacgtacatataattttatacatatatgtgtaaataaatagataattatatgcacacacacaccgtccataaataaatagaattgtttaaagacacactggcaccaaaccaaagtgatcccttgaagtaaccagaagatttgaaagagaactggaaaagggactcaatttctgcctgtgcaattcaaaggtgtctttgatgttactcgcaggaaacgctgctgttaagtgtttcaagtctggggaagcaatgcgcttaccacaccctcatatccttgtcaatgcttatttttatgagtttcgaagtaagtatagagtctggaaatgtcacagagggaagcgatcatcaatgtcaagtcctctctttgatgacttgtgagacacagagcggggtgatctctgcaagtctcagcaagtggttcagtactaaactggttcccagatttcctgactcttcccggtgggcatgaaatccctgtgtttctaaacgctcctacagccttcgagaaggctcctaaggcacttagagctccttctaaactgatgcaggcccctaatcctggctttcatctccttgagccaaggacagcatcacgtaggcttccaaccgtcgtcatgaggtgtgagtcataccggcctccacacctgtaggaggtaatgcctaacagggagtgatggaaccggtatttccatccactcaagcaaataaatgaaaaccaacaagctctcaccactggggaaaattaaccatccacagaaaccacgaaaacattactaaaggagttgtcagtaatttataaatgaacagattcccaaaatttaaaaagaaaaatggagtcatcctacacaactttcaatgtgcttaacatgccccttaaaattgaaaatgaggctgggtgctcatgcctgtaatcccaacactttggcggagccaaggtgggaggatcacttaagagtttgagaccagcctgagcaacttagaaagattccgtttctacaaaaaaattttaaaattagccaggtgtggtggtgcgcacctgtagccccagctacttgggaggctgagatgttgcttgagcccaggagtttgaggctgtggtgaactatgatcacaccactgcactccagcctgggcaacacagcaagaccttttctcaaaaaaagaaatattgaggccaggcacaggggttcacgcctgtaatcccagcactttggaaacccgaggcaggcagatcacttgaagttaggagttcgacaccagcctgaccaacatggtgaaaccctgtctctaccaaaaatacaaaaattagccaggcctggtggcacacgcctgtaatcccagcaactcaagaggctggagcaggagattcgcttaaacctgggaggcagaggttgcaatgagctgagatcacgccactgcactccagcctgggcgacagagcaagtctctgtctcgaaaaaagaaaaattgaaattgaaatccaacatcctgggatgagctgacccacagaagctttttggtaatagccaaaaactgaaaaaaccaaaatactcctcgagaagtgaatggttaaatgtcctacggcacatccattccatggaatactactcagcaatgtaataagcatttattcgatattatactttatgtattataaaaagaaaggcaattatcattggcagagaagagagtcatcctccaaaatatggacctctttagtcatgcctaatggaacatagtataagaattattattcccttaataattattatttccttcctagagagaaagttatattagctaatcataaatacacagaatctagaaattgttctaaaactttatttttctcagtggggcgcagtggctcacgcctgtaatcccagcactttaggaggctgaggcgggtggatcgcctgaggtcaggagttcgagaccagcctggccaacatagtgaaaccccgtctctactaaaaaatacaaaaaattagctgactgtggtggcgggtgcctacaatcccagctactcaggaagctgaggcagcagaatcgcttgaacctgggaggcggaggtagcaatgagctgagattgtgccattgcactccacggcaacaagagtgaaactccgtctcaaaaacaaaacaaacaaacaaaaaaacctttatttttctcttgaggctcccatcagactacctgggaaggagatcttcgctcctgtctccctttcctttcctttctcttatccctcatttcctttgggtttggttttttttttttttttttagtactaactgcaggatcttggctcccagtgaattggctaagattgtgaagagtattgacagcttggggctgaatcctagttttgcctttcagttgcatttgatattagacacatttcttttcttttcttttttacttcccatgctgcactgatgtaacttttttttttttttttttttttttagtttctaatttttgtgagtacatagtaggtgtatatatttatggggaacacaagattttttttttgtatccattaaccatccccacttccgtcccaccccccaccacccttcccagcctctggtaaccatccttctactctctatctccaagagttcaattgttttaattttagctcccacaaataagtgagaatatgccagttccatctaaattgttgcaaatgacaggatctcatttttttatggctaaatagtactccattgggtataataagtaccccaaagtccactatgtcatactttttttttttttggaggtggagtttcactcttgtcacccaggctggagtgcaatggcacgatcttggctcactacaacatctgccttctgggttcaagtaattaccctgcctcagcctcctgagtagctgggattacaggcgcccacaaccatgtctggctagtttttgtatttttagtagagacagggtttcgccatgttggccaggctcgtcttgaactcctgacctcaggcgatccacccacctcggcctcccaaagggctgggattacaggcatgagccaccacactcagcccatcgtgccctttaaaggaaatgtatatgttcctttgagcctttaagtttctcctatagcctgggataaaaatgtatggttgggctgggcgcagtggctcacacctgtaatcccagcactttgggaggccgaggtgagtggatcacttgaggccaggagttcaagatcagcctggcgaacatggagaaaccctatctctgctaaaaatacaaaaattagccagtcatggtggcgtgcgcctgtagtcccagctactcaggagactgaggcacgagaatcacttgaacctgggaggcggaggttaaagtgagctgagatcatgccactgcactccagcctgagcgacacagcaagacccttgtctcaaaaaaaagtatgattggagctaaagaagcaactttggactcagacatggaagctatgatttaaggaaagcactttaccagccctaaactacccacctccagacctgtacatgagcaagatataacttctatccaggttaaactactctattttaggttctcgttgttacagcagctcatactgtacaataatttaaaagttagcaccaagagtggggttttgccctaataagtaccagatgtggggttttgccctactaagaaccagaactggggttctgctgtagtaaaaacctgaactgtaaggcattaacttgaccatcagacagcaggtcatgaagacacagatacaaggtgaggatctggtgatctatgttacattatggcagaccactaggtaaaactgtgatgtcttgaatgacagagcaggcaccgatggagtctccaagctttggagatgtcattggaagaacccagactatttgtgtgtgtgtgtgtgtgtgtgtgtgtgtgtgtgtgtgtgtgtgtgtgttgactacttctggctactattaataaagagagagatatgtactgtagaagtggagatggaaaggaatagaattgtatcagtgaggccgggtgtggtgcctcacgcctgtaatcccagcactttgggacgccaaggtgggcggattgcctgagctcaggagttcgagaccagcctaggaaacactgtgaaacactgtctctactaaaatacaaaaaattagccaggcatggcagtgggcgcctgtagtgccagctactcaggaggctgaggcaggagaatcgcttgaacctgggaggcggaagttgcagtgagctgagatcgcgccactgcactccagcctgagcgagagagcgagactctgtctccaaaaaaaaaaaaaaaaaaaaaagaattatatcaagggaggctctttctccatgcaggctacagttgaaatgaactgacggtggtgattcagggcctcacagggcttcaaagcaaaacacctcctgcacccataaaatgaagcatccatgcaagatggctctgatgaggcaacgggttctcagcagcttcccacttggaagtctcttctagactgtgagagtcagcccaggagcaagagtactgcctcccctctcaactctgcctttcaaaaagctaagagtagctgtcactaacatgagagaatatccccgggcgcggtggctcatgcctgtaatcccagcactttgggaggccgaagcgggcggatcacgaggtcaggagatcgagaccatcctggccaacatgttgaaaccccgtctctactaaaaatacaaaaattagctgggtgtggtggcacgtgcctgtaatcctagctactcgggaggctgaggcaagagaatggcttgaacctgggtggtgaaggttgcggtgagccgagatcatgccattgcactccagcctgggcaacaaaagcgaaactccatctcaaaaaaaaaaaaaaaaaaagaaagaaagaaaataaaaaaagataagagagtaccaaggtccaggcatagaggctaggaaataaaggaggacagagttaaggtttaagaactatgccagagaagatattgataattggctctcgctccttgcatatgggcctgcctggagacaagaggatggaaagtctactaaatttttgagatctgcattgtcaaagaaactatataagtctggactgctttggcacagtcttttgactgtgattatttgacattaaaaagaaaatcttggtggggagcaatggctcatgcctgtaatcctagcactttgggaggctgaggcgggtggattacttgagatcaggagttcaagaccagcctggccgagtagtgaaaacccatctctgctaaaaatacaaaaactagcctggcgtgatggcgcatgcctataatcccagctacttgggaggctgaggcaggagaatcacttgaacccggaaggcagagattgcggtgagccacgattgtgcccctgcactccagcctgggttacagatggagactccatctcagaaaaataaaataaaataaaataaaataaaataaaaaaatcttggccaggagcaatggctcatgcctgtaatcccagcactttgggaagccaaggcaggggaatcaattgagcccaggagtttgagaactggcctaggcaaaaaagtgagacccaatctctgcaaaaaattaaaaaaattagccgagcatggggttgcatgcctgtggtcccagatacatgggaggcagaggtaggaggatcccttgagcccacaaggttgaggctgcagtgagccatattcacatcactgcagtccagcctaagtgacagagaaagaccctgtctcaaaaaaaaatctgtatcatgaaccccctcaaaattgtaccagcaagaaacgagaaaacttcagaaatggctttggggcatagaagacaatgaagggccccactagcgggcaaaaccaaggaccatggaggacaatggacaaacaacttactctctggcaaggctgcccttcaaggagtcttcacaatttctgcctgataaaatttgcatttgttttgttttgttttttacagactgggtctttctctgtcgcccaggctggagtacagtggcacgatcatagctcactgcagtctcaatctcctgggcccaagcaatcctcccatctcagccttctgagtagctgggaccacaggcacatgccaccacacccagataatgttttgtttttttgtagagatggggtctcactatgttgcccaggctggtctcaaactcgtggcctcaagcaatcctccaacctcggtttcccagagtgctgggattacaagcatgaaccactgcacacctagttaatttctgcataatgaaaatttcatattgcggttcattgacttttgtgtgtttcccacgcttccattgaagtggaggttttttattgtttgggaaattgggggcagaggtgtttgtttgtttgtttgtttgtttgtttgactatggttttaccacttatactgcatgtagactagagggagctttttaagtttgtaggccaccagaccatgagaaaccataccagagctcaatggaggaatgttatatttcaaaccagaccagcgagtggatgagtcattaggctatgtctcttggatagggatggtctgtgtatgagaagaaggaggtgcatgtacactgtatgcagtggcaccagttcatctagctctgcctgtttagggaggtgatttagatatttcagaaccaagatatctacaagacaaataaactcttctcttgccaactcaatgttgctaactggctgcatttcattgcatatctcttttaacttaatttctatttttaattgtggcaaaatacacacaacataaacactaccagtagagtcatttttaagtctacagctcaatggcattacgtacattcacactgttgtgtaaccatgaccaccactcattatcaggacttttccatcttgcaaaagtgaaactccatacccattaaacactcactctccattctcatctcccttaggccatgacagctagtgttctactttctgtctctatgaatttgaatgctctgggtacctcacagaagttgaattatctgggtacctcatagaagtagaattatacagtacttcttattttgttattggcttatctcacttagcatactatcctccaggctcatccatgttgtgtcagaatttccttcttcttaagaatgaataatattctgttgtatggtggtatgtgctataccatgttttgtttattcatccatccactgaagggcacttgtgttgcttccaacttttttggctattgtgaataatgttgctctgaatatgggtgtgcaaatatctcttcaagatcttgctttcaggctttttggattacacccagaagtagaattgctagatcatatgctgaatctatttttaactttttgaggaaccacctgtattagtctgttctcacactattaataaagatatacctgagactgggaagaaaaagagcattaattggacttacagttccaatggcttggggaggtctcagaatcacgacaggaggcaaaaggcacttcttacatggcagcggcaagagaaaatgaggaagacacaaaagtagaaacccctgataaaaccccgtttttactaaaaatacaaaaattatctaggtgtggtggcacacacctgtaatcccagctactcgggaggctgaggcaggagaatcacttgaaccaggaggtggcggttgcagtgagctgagattgcggcactgcactctagcatgagtgacagagtgagactccattaaaaaaaaaaaacccacacaggtttagaatctcaaagtgtctatagatcaggaatcttagttggggcacagctactcacaggctgcaatcaaaaggttggccagagctgcggtcttatctgaaggcacaagtgagtaaggaccctttttctagtttatttatgtggttttagcatgaattcagttacttgaaaactgttggactaagggccactgttgctcactggatgttggctgtaggctacactcagtttcttgcctctccaaataggctgttggcttcatcaaagccagcaagagagagattttgctgccaagaaggatgccaggatctttgtaacacaatcatggaaatggcatccactcaacattttgatattctattggtcagaagcaagttactcaagaggaggaaattatatgaggtcatgagtaccaggaggtgggatcactgggagccatcttagaggttccctgccatactgtctcctcttctgtattttagggctccagtgcctgaccacttgcttccccaacttctagcaacaccttctccccttctagtactagaaaggcattctcctcccatcatatccttatagtaagctttaccctctcttgccatgtgaccatgatgacagaatcatttcagcggaacgtgatttatgggaaagtggcaaggatttcaacaaacacatctgtttaggctgggtgcagtggcacacccctgtaatcccagtgctttgggaggccaaggcaggagaattacttgagcccaagagttccagatcagcctgggcaacatagtgagatgccatctcttttttaaaaaaaattatccaggtgttgtgttgtgtgcctgtagtcccaactaactacccaggaagctgaagcaggaggagtccttcaacccagaagtttgaagctgcagcaagctatgaatgcaccactgtactccagcctgggtgacagagtgagacgctgtctcttaaaaaaaaaaaaaatctgtttagaattttcaaaatagtatccttgtgagtcatataatcatgtatatgtttaaatacacagaatgagcagcagaaatggaaaacagagatgcaaggagaagcattgaaaaggcaaggcacagatgtctacatgaaaagttagagttatatgagataatgactcagtttccccagcatgatcagaagagtattgatggggagagtttcccttaggcctggcctattttattcttaggcaattctacttgtaagtgtatcaactggattcaacaggaaatggaagacacattgcttctgggtaatttaggggaagtttttcaaagggtctgtttgtaatgatgtgggcaaagttaagggctggtgtggcatcccagagctagcaacactggggagctgttaacacttattaatgcctgatggtgcaaggaagagaatgcttacagatgaccagaaaaagtggctgtgtggaagggcctatggcccctaataaagagagcagccaactacagcaaccaagcatctggtatctctatagtctccctgacatttctttccttctgacctccatctcctgacaatgcctccaattggccaaacccaaccagaaaccagagggtgccaagcccatcagtgtggtccatataggttggtctcccgagacaacaagcaaagtagacattttgggacaaatagaaaacacagcacataaagcacagcccatatcatattttcttggagaattttatggtgtcagcttcatcacctgtgttcagcaaacttcccttttcctaattccacaaagtataaaggtaggttattgatttaggatctttcttctttttcaatgtaagcattcgcagctatgaattgccctctgagccctgcttttgctgcatcctataagttttagtgtgttttgttttcattttcattcatctcaatgtactttccaatctaacataatttcttctttgacctcctggttaagagcatgttgcttaatgtctgcatacttgtaaagttttcttctgtcactgatttcttactttattccattgtagtcaaagatactttggattatttcaatccaacaccagcatctaattaaacaaaagttaattactaaagcacagtgagacaccactttacatctattaggattgatatgatttttaaaaacacaaaataggccaggcacggtggttcacgcctataatcccagcactttgggaggccaagatggccagatcatgaggtcaggagttcgagatgatcctggccaacacagtgaaaccccgtctctactaaaaatacaaaaattagccgggcatggtggcacgtgcctgtagtcttgctactcaggaggctgaggcaggagaatcatttgaggtggaccctgcagtgagccaagattgcaccactgcactccagcctgggcaacaaagcgacactctgtctcaaagaaaaaaaacattaaaaaaaacctacttcttagtgtgacaaaataaaagaatgctgaggacggtgtcagtccagatcaatgctactagacacaaccttccacagcccaccctcaaggggctgccttaatggcatcctccactggtgcacatcagacactgcagaccaccgtgcatcgcagccaagtccaggaaatgaagacgaaagaaaaagcatccattcctgagcttatgccaagtctcaggcactattagttgacaaagcctatctcatttaaggcatgggagtgaaccctgtttaccagatgggacaactgagtctgtggaggtacacatgctaataaaaaccctagagtggctgggctcagtggctcacatctgtaatcccagcatttagggaagccaagacaggaggcttacttggggccaagagtctgagatcagcctgggcaacagagtgagaccctatctgtacaaaatcagaattttaaaaattaattgggcacggtggtgaacacctgtagtcccagccatgtgggaggctgaggagggaggatcacttaagcccaggagttggaggctgcagtcagtcatcattgcaccactgcactccagccttggcaacagagcaagaccctgtctccgaaaggaaaaaaaaaaacaaaaaactaaaatagcctgaaacgtagagcaggtttttgtttgtttgtttgtttctgttttgttttgagatggagtttcgctcttgtctcccaggctggagtgcaatggggtgatctcggctcactgcaacctccacctcctgagttcaagcaattctcctgcctcagcctccgcagtagctggaattgcaggcctgcatcatcacgcccggctaatttttgtatttttatcagagacggtgtttcaccacatttgccaggttggtctccaactcctgacctcaggtaatctgcccgccttggcctcccaaagtgctgggattacaggtgtgagccaccgtgcccagccaagcagattcttatttaaaaaccccacggctccacgccagggtcctcctcagagccactctcacctccttgttccacagagtgcacaccacagggttcagcagtggcatcaccaccgtgtagaacacagccaccaagcggtcctggtcggggttggccccggactccggacgcaagtagatgatggaggcgcagtcaaaatgtactacgaccacggtgacgtgggccacacaggtggagaaggccttgcgccggccggctgccaaggaaatcctcacgatggcagccacgatgaaggcataggagaagaggatcgggacgaaggacatcagcaccaccaggacgctcaggaaaaagatgcccagcgccttgctggcactcttggcgcagctgagcttcagcaccggggcgatgtcacagaagaagtgctccacgtggtctccgccgcaaaagggcgatgagaagatcatgctggtctcgatcaaggccaccgagaacccagagcagaaaaccagggctcccaggcagaggcaaacggtgggtctcatgaccatagagtagcgcagggggtggcagatggccacatagcggtcataacccatcagggtaaggaggaagcagtggctgcatcccagacccaggaagaaaaacatctgagcctgacagccagggatggagatggcctggtctccatcagcagatgagccagcatgctggggatggtgaccagcgtgtatagcaggtctccgagagggacagcaccaccaggaagtggtacatgggagtgtggcgggacctatccgcatgggtgatggtgatgatggtgacgttgccaccgagggtgaccaggtaggtaaggaagaacagggtgaagagtgtgttcctcaggtgtgggaggttggagaatcccatcatcaggaattctgtcaccagacaggtcccattttcctgctgcttgtaaagagacagagaggaggcaacagaataggtaaaatagagtgattaataagggtctgcgatgcatcaggtagcagtgtggaaagaaaatcatttctggccaggcacggtggcacacgcctgtaatcccagcactttgggaggccaaggcgggtggatcacccgaggtcaggagttcgagaccagcctggccaacatggcggaaccccgtctctactaaaaatacaaaaaatgtagctgggcgtattggtatgcatctgtaatcccagctacttgggaggttgaggcgggagaatcactcgaacccaggaggcggaggttgtagtgagctgagatcacgccactgcactccagcctgggggactgagtgaaactccatctcagaaaaataataataataattcctgttttgcaaaaactgaaaggggtactcagaaacaataagccctttgttttcctaagagtcacacaactagcaagtgactcttccacagataagaaaatcagaggaatgtatgagaaaatgatatttggtgtgtggaaggaagatggtaagtttgaatttctctagaaacagatgcttgataagaattcaagagaaatattttatataaaagatgatttcaagtgacatacatagggaagtaggacgtgaaacaaggaaggtagataaccaatacaatgtacatcaccaaggaaggtactgccgtgggccactggaatttaatcttatgtgcagaaccgtgggacgtgtccaggaatatacacttctatgtttttttacccaaggtatgagggagcttggggatatatccactcagtcccattagccactgattgaagatttctctcaggaggcattaaagtgccagcacatgccgcttgccatgtgtacagaaaattcaaagtctggctcagcaagaaaaataggagcaacggggatgtaggtgagaattttacagggtctgctatagtccatgtgaaaaagaatatctggccagacacagtggctcacgcttgtaatcccaacactttgggaagccaaggcaggtggatcacttgaggccagaagttcgagaccagcccaaccaacatggtaaaaccctgtctctactaaaaatacaaaaattagccaggtgtggttgtgtgcacctgtaatcccagctactcagcaggcggaggcaagagtattgcttaaacccaggaggtggaggttgcagtgagccaggatcatgccactacactccagcttggacgacaaagcaagactctgtctcaaaaaaaccaaaaaccttaggaaggcaaaggcaaagactgcaaaattgatacctgaaataaaccaaataacactttcaggagaatgaggtcagcaagattgtggaatagaagttttctgcctttacttccttcagctactggaaattgctggcaactgttcaaagtgaagaatgctatcattaatatcaagaccttaggagtgaggctgagatgcccccttggactgaagaataaaaaaaaaaaattcatggtgaaacagtaagaggaatggttctctctgactacactgtccctccctgaggccagcaggacaccatatgctgagagttctcctggacccatggtttttgcagtggaagggatgagttggaagtgaacattcagcttctccatcattctgggattcttcacgggtagcttgctcctatctcgtcccacttgaaatgttgagaatgccggcatggctggacaccaggggtcagttcggtcaaagaacagcggacgaggggctcacaggaaccagttcacaagttttggtacttgcgctgcatccccaccagcagaagtgccgatatggttaggatatttgtccccacccaaatctcatgttgaattataatccctaatgttggaggtggggcttagtgggaggtgtttgggtcatggaggcagattcctcatggcttggtgctgtcctcacaatagtgagtgagttcttgcaagatctggtcatttaaaagtgtggagctattccaccccactctctctctcttgctcctgcttttgttatgggaattgcctgctcccattttgcctttcatcatgagtaatgcttcctgaggcctcctcagaagcaaagcagatgacaccatgaagcatgctggcaccatgcttcctgtacagcctgcagcactcttagccaattaaacctcttttcctcatgaattactcagtctcaggtatttctttatagcaatgccaagaatggcttgctacacttgccacaccatagaaactagcaaacagcatcatgtgcaagaaacatggtgcatgttatttttcctaacaacattaccacccagccagggaaaacaacatccaaccatgcctgatcagagacaattgcagagcccagccagccgccccacatgatggcagagtccagccaggtgcccttaccagactgtggaacacattcagaaataccactcaacctcagagaacaggaagcaactcagcccagttagagaaccccacagcaaagtctgcctgtctggagtttcaaccagccagcccacccagaattccaaactaaactaaataataaaggtctatcacaaccaaattccacctgcaaaggctggaaaggatggctgtctcctcaaatgtaaaagcaactacgtaggacacaggtttatgttttaaaaaacaaacaaaaaaataaaaaaacaaggaaacataacactactagaaaaaaataataaagctccagtaacagacccagaagaaaaggtaatctataaaatgactgaaaatgaattcacaatgattctctaaaagttcaggagcctaaaagaaaatacagatagaaaattaaatgaaatttgaaaaaactttataaacaaaattagaagtttggcaaagaagtagaaacaattaaaagcacaaatagaaatcctaggaagaaaaaaacataataacctaaataaaaagtttgatacaaagtaggattaagagtgtagagatactttatttctgtgatcaaagttaagtggttatcatcttaaaataatcttttaacactataagatgtattttgcaagcctcatggcaagcacaaagcaaaggcctataatagatacacaacaatgaaaaggaaggagtcagtgttcgctttggcagcacatatactagaaatggaatgatacagggatgatcgtggcccctgcacaaagatgacatgcgcattcttgaagcatcccaacataaaacttattttaaaaggaataaatcaaaacatatcactagaagaaagcatttaagcactaagaaaaaaaagtaaatgaggaagaaacaaaaagaatacataaaataactagaaaataatcagcaaaatggcaatagtaagtcctcacctgtcaacaattaccttgaatggacacgaattacattctccatcaaaaaacatggggtgaaggaatagatagaaagaggcacccaatcatgtgctgcctaaaagagacttaattcacctgtaagaaacacagaatgaaagagatggcatggaaaaagatattctagggctgggcatggtggcttacacctgtaatccaatgctttgggaggccaaggtgagcagatcacttgaggtaggcattcgagaccagcctggccaacatggtggaaccccacctctactaaaagtacaaaaattagccagacgtggtggtgtgtgcctgtaatcccagctactaaggaggctgaggcaggagaatcacttgaacccagaggcggaggttgcagtgagttgagatcgcgccaccgcactccagcctgggcaacaaagcaagactccatctcaaaaaaaaaaaaagaaaaagaaaagaaagaaaaatataatccactcaaagggaagccaaaaaaagagcagggattacaatccttatgtcaggaaaagaaaataaactttaaataaaaaactataaagaaacaaagaaaaacattatataatgataaaggaatcaattcagtacaggatacaacaattttaaatatatatgcaaccaacaatggaaaacataaatgtataaaacacatattccctgagggattcatgccatgaaaaagtacaaggccttacttcaaatcttcagaaactgaagtaaaatgaaaccccaagccaagaaactcagactctacttaagaaatccagatctaggcccggcacgatggctcatgcctgtaaccccagcactttggaaggccaagcaggcagatcacaaggtcaggagtttgaggccagcctggccaatatggtgaaaccccatctctactaaaaatagccgggtgtggtggcacacgcctgtagttccagctactcgggaagctgagacagaagaattacttgaacccaggaggcaaaggttgcagtgagctgagatcaagccattgcacttcagcctgggcaacagagcaagactccatctcaaaagaaaagaaaagaaaatccagatctaataaaaagcatactggcagacatgccctaaatatgtctgaaacaggcctttttatggtgaagtaaacaacatcaaagggaagaacagaaccctttatagagaccgtgatagaaactcaataacatggaagacttcacagtgaaaaaataatgagatatgactatttaagaagtataattacttaacatgacaaaacattgttaaattgaaacaaatttataggcaaatcacgaactagaacaaagctgtgataaatgtttacctcttacaaattaagaaaaatgtgagccaggcacagtgactcatgcctgcaatcccaacacttttgagaggccaagacaggcagatctcttgagcccaagagtttgagaccagcctgagcaacatggtgaaacttcatctctacaaaaaaaaaaaaaaaaaaaaaaaaaatatatatatatatatatgtatatatgtatatatatattagccagccataatagcatgtgcttgtagtcccagctactctggaggctgagaagggaggatcacttgagaccaggagatcaaaactacagtaagccatgattgcaccactgcactccagcctaggtgaacagagagcgaccctgagaaagaaagaagaaagaaaaagagagaaaggaaggaaggaaggaaggaaagatgggagggagggagggaaagaaaggaagaaagggaaagaaaggaagaaagagaaagaaaggaagaaaaagaaaggaagaaagagacagaaagaaagaaagacaaaggaaggaagggaagggaagggaaaatgtataggaccactccccaacattcatggagctcaaataaagacccatataccatgtgactgattatttaaagttaaaagtgaagctaataaacagttaagtaaaatatgctctaactcatcacactgacagccttcataatgacatgaaaaaacagaattcaatttaggatttctggactctttagagttccactccagaatgtgatgctgtggagagcaccgtgtgctagtttctagcccatgtcctatccccttctcttcccaccccaggtgccacttagcactgcgaggggccttgtatgtatgtgtacagatatcccaaccatgcaccttcaagatgcagcaacaccctccttaactacaccactgcttaaccacacctaaggaaatacacgccagcagtgtggttcatatcagaagaaagaagtcctacttttggccctgctagtggcttggagccacctgggcagggaattctagggtcatgtagcgcatcatctacaatgaggtgcaagctcaaggtaaagacatactcttgactttgtaaactcttcaccccttgggatggggtagagtcgagtcctcagatgcatcagtgccagggcagaatccctcttgcccaaggctaacagtagtcctctaacaccccagtataaaatcagcagatgaccctgatttcattatgatataatgtatacatggattgaaacatcaaactgtactccataaatacatagaattattatgtgtctgtctagataatttcacctctagatttttctcattgaaaaataactgcacttagatatataggaatgttcataactgcattatttaaatttttaaagaggacatgacctaaagtgttctatagtcgaaatgcccttacaaacaagggtaaaacaaaatactgacattctaattgaaaaagatacaaagcacaaaaataataagacattattaaagtcgtatctttgagaatggataataacatgggaagaattctcatatatgggttgtgtgagagtgggatacgaaacagtaaaaattctgtgatgacattcgcatacattctttatacttttttgaatttcccaaatattctacatcaattgctaatttgtatcaatagaaaaataacatttcttagaggatattttttctcttgataaacccttttcctgtttaatcaatctagtttgacagaggaagccaagggttgagataaacaatgcaaaacatgctaaagccatttgtaactaaagtgttttgttttgttttgtttgaaatcgagtctcactctgtcgcccaggctggactggagtgcagtggcacaatctcacctcactgaaacctctgcctcccggattcaaatgattctcctgcctcagcctcccgagtaggtaggattacaggcatctacctgccatcaagcctggctgtcatttgtaattaaagttttaagaaataatctgaagagcaagtgactgtggaagagaccctttaaggtattatcacaggctcccttcaggtataagtcagcaccctcttgggcatcacatggaagggaattggaaaggaaaccccccttgatatttgctcagtgtaggagtgtcctctaccacaattatcctgcctccacttgcttgcctccagtgatgagaagatcactagctgcaaaaaaatgcccattacctagagcagaaatttcatgctcaaggacagcccctcagtgaccagcagcaataccaagtagagctctgtaatatcacaagcctagatttgaatgctggtgccttaccaggaacagggtgaccttggtcagctaattttgctcctctgagcttcatctatgaaagtggagattgatcttctgaagtcacgggtaataggaagatgccctgacagtgttaggaatcttttggtctctaactacatttttttttttttttagactgagtctcgctctgtcacccaggctggagttcagtggtgcagtctcagctcactgcaacctctgcctctgggttcaagcaattctcctgcctcagcctcccaagtaactgggattacaggcatccaccatcacgcccggctaagttttcgtatttttagtacagacggggtttcaccatgttggccatgggccaggctggtctcgaactcctgacctcaggtgatctgcctgccttggcctccaaaagtgctgggattacagacatgagccaccacactcagccggtctctaacttcttatgaggacgcctgggattcttattctctgctctgcactgcttgagaggcagagtatagcaggtttaatttgctcacattctcagtcctggcatcaggattggaacccaggagtctgtctctggaggctgtgctttcaggagtgtgagtttcagcgactcacctttcattacacacatcttcatgaacagctcctctgtgacaggtgcttctgagggcatgaggacacagcagggaactaaatgggcagagatacctgccctggaggagcagaaggtactaagggaggcagccgcgcaatcagccacaaacaggataactcaacaagtgagttacatcagagctaagtgctagaaacagaaaagaggacctaaagggagaattgagaaatcaggggagagttgccattgttaatgggatggtcagaaaagtccttgttgatgtttaatcacggtcagctcagaatttctccttcctcgactgccccaattttctgatctcagctctaggctagagatggatcagcgtggcttctccagccaggcaaagaccccgaattcacaattgaaaaagaatgagggaatgagtcaagacggaggagagcattccaatttctccttccttgactgccccaattttctgatctcagctctaggctagagatggatcagcgtggcttctccagccaggcaaagaccccaaattcacaattgaaaaagaatgagggaatgagtcaagacggaggagagcattccaggtagaggcaacaccctgtggctgcaccatgcctggtacaggagcagcaaggaggaatagtgagggagagacagtgagggagagggagcaggtaagcacagggaggggacagagggatgttgtgtaggccttgtagatcaaggggaggacttggcatttactcctaatgaggtgggactatggaggggtctaagcagaagagggacatccccaggctcaggtgttcccagacgccctctggtggctatgggaaaactgtgcgtgaggcattggacacagcaggttaagaggtgactaggctggtccaggccgatgataatgggatcagtgtggaccacgtgggccattggaagtgggcttgccatggtgggcacatggaggtggtgaggacttgcccatctggatgggttgtgaaggtgaagcccaatgaattttttgatgggttagaagtgagtttagagacaggccgggcatggtgactcatgcctgtaatcccagcactttgggaggccaaggcaggcagatcacttgagatcaggtgttcaagaccagcctggccaacatggtgaaaccctgtctctactaaaaatacaaaaattagctgggtgtggtggcacatgcctgtaatcccagctacttgggaggctaaggcaggagaatcgcttcaacccgggaggcggaggttgcggtgagctgagattatggcactacactccaacctgggcaagagagtgagactccatctcaaaaaaattaaataaataaacaaataagtcaggtgcagtggtgtgctcctgtggtccccgctactttggaggctgaggtggaagaactgcttgagcctaggaggttgaggctgcagtgagctgtgatcatgccactacactccagcctgggcaacacagcgagatcttgtctcaaaagaaaaaaaaaaaaccttaaccatttccattcattcatgtattcattgaacaaatatttaaatatttttaattaaaaattttttttggctgggcatagtgactcacgcctgtaatcccagcactttgggaagccaaggtgggtggatcacctgaggtcaggagttcaagaccagcctgtccatcatagtggaacctcgtctctaccaaaaatacaaaaattagccgggtgtggtggcacacacctgtaatcccagctacttgggaggctgaagcaggagaatcacttgaacccaggaggcggagtttgtagtgagctgagatcgcaccattgcactccagcctgggcaacaagcgtgagactctgtctcaaaaaaaaaaaaaatttattgttttaaaaacagaaataggctcaaagaaagagctggtggaggagctggcagagtcacactgggggataggggcagggccagcccagctggagttcagcgaggactctgtccatctcaggattgctgggggtggggacccacagtgtctagagctctcaaaccgacaacctggcccctctccgctctcatcttggaggtggcgtctgccccaaccccctgcacccaccccagacagaaggaagaagaaaggaggaaatcccaaatgtggctgaacattaactctgcaacagctgaggagctgtgactgagtttgctgcaatgtgtccagattccaggcctgacccaaaaagaggtcaattcacaggagtagaatattccttatttgcctacctggaacccatgaaaattgcacccattgagagcgcccaggctggttgcttgcttagtgagagagttacagggaaccagttggtgctgagttcaaggaccaagccaatgccacctccacagtgcaggggagaggggaccaggtgacactcctgagagctgtctggagccgggaagctgaggaatgcatgggactggggtctggagtctttccttttcctctttcttctcatcaggaagacccccaaaggcccttctccgcccctttcagccccaccctaaatgactctgtgtgtgtgtgtgtgcgcgcgcactcatgagactctagggcacatgcgtgtccacaccccatatcttccctgtctgcttgcacacctgttcacaccatgatgcagtgtctgcatgtgtgtgacttttcaagggtctcttttggttcccccagatgcgcctccttgcctttctgggaaaatcttatattcttctccagcccatgctttgtagttggcaaaaaacagatcgaacacctttctgggaaactccattcaagtgtgtcactgcttagccttttctgggttagcatagtccctctacagtttctctctctccccacttatttgtagatctgaaccttaaggccagggatgggccggggtggctccttcagccaggaaaagcctctgaattcacactcaccattgccaagggaggctcctgcagtgcctgctggcatcgctctgttcaccacctaaaaagggaggggctgaggacacagctcctgttatgctgagggtccccagagctgccatcccacaggccccctgaacactaagaagtcccacggagctcaggcaggtggcaccctgaggggattttccctccaggaaactcaagacccctgggtcagcttcctaagcccacagaccctgcatgcacagagcgggaaaaggactaattactatttctttttgtggataacaagcagaaattcattaatgaatggcagagcattcattcatgctcctagtacccacctgcgctaggcaaggctgcttcctgaggaaatgcacccccaggccctgccctcaagagagggaggaaggagtggatcatttgatgttgttctaccaatgttgcccaggtttaacatctcttggtgacctcagccttctccatccctccttccctagaccattaattaccaaatcagcattcttcctcccaaaattctctctatcccctcacctccaccccaactcaggactgcattattcttacctgttgcaagaacctgcagtgtcaactccctccagtctgacctctgcactgaccccaggacagaaaactcaagctgtgctcctcctctacgcaagcaccttccatggctccccattgctttcaaagtttaaaatccctccatcttcacatccaagactgttgtgatatgacccctgccacctcctctactactaaatacagccattgctccactcataacaacactcactcctacttttactaaaaacacaccaccagcatcaccttctccaggaagccttctgtaagaacccccaagctagtcatatgcagtatctgggctaccagaagtcctgggttgtctcttcatattgtctgtgttcctctgtgtctcctgttagcctgtgagctgtcggacctggcctcatcttattcctttctccaggagcattaaacttagatgataaatctgttccttgcaatgctcctttctctttcttttcatggtatatgctttttctctggccactcttccttagtctcctcctcttctgacccctaatatgataattccccagggctcagtcctagaccttcttatctctccctagctgatgaatatagactcatgattctgtgtacccaatctatgccaaaaagcctgcatagtttgggtttcccccagacacagactctgagacaaggattccagtggaagtaagtttatttgggaggtgataccagatctgaagaagtgaaagtaggaacaaaaggaagtttataaagcatgtcctatcaagtaacttatccctgtaagcaactggggtcaatcccactggagacctctgggtggcagcatagaacattcactgcagaggggtaagggagctgaggtatgtatacacccactccagttggttattgttgagggttgctcctgagtgcattaattatccaatactcctgtcctgctgtacatgtggatggagtaagctttaatgtccagagaaagccctcagacaaatagatgcaagcaccgagtgttggaaatcaggccaatatgcagtgaagttgtcagagaaagtggatgcgggcaggggactgacaccatctgctgcatgtggtttgtccacttcatttctgaccattctttgtcactctctttctttacttttactgttctgatattgaagtagctcacggcttcaaccttgactctcttctctctaactgattagtacaatcatatggttttaaataccacttccttaccagtattccccaaatctacatcttagatcagccaaccactctgagctccagatgcataatccaacaatcaatcatcaaccaatgtgaggtggaatgtcagaaaaaatgtcagagtaaggacctccataaattatgtcctccataaagaatgaaaaagctagaaaaaattgttagactaaatttttgggaattctagaaattaactaaagtcttgcagcaactcagagaaaatgtattcagaaaattactgaatatcagtgagaacagcatactcggcattttaacatctctggtcttctcccccactctccagctccgtggtcgtcttgaaaaataccagcccaaactctggtgcagcctggcatccaccagagagagcaaaacagaactagagcactttcaagcctcattcccaaagaattgtcattattttttaaattttatttatttatttatttatttattgagatggagtctctctctctctgtcgcccaggctggagtgcggtggtgcaatctcagctcactgcaacctccgcctcccaggttcaagcaattctcctgcctcagcctcccaagtagctggaattacaggcatgcaccaccacgcctggctaatttttgtatttttagtagagacagcgttttaccatgttggccaagctggtctcaaactcccgacctcaaatgatctgcccacctcggcctcccgaagtgctgggattacaggtgtgagccaccacacccggccaagaattgtcattatttaccaagctaatggttccctgcaagatcccactggcaaagctctctgtatttgacctggctctgagataaaccatgcaaaaagccttcactctgggggtcctttgttgacaacagctacaggaaggtattttagcttcatggatgcctgaggcagtgagtgacagttgagacaaatagactaaaccaaaagctagggaaggagctgtctatagaggctttgaaaggctcagataaggctgggtgcagtggcttatgcctgtaatcccggcacattggcaggccaaggagggtggatcacgaggtcagtagttcaagaccagcctgccaacatggtgaccctgtctctacttaaaaatacaaaaattaggccaggctcagtggctcatgcctgtaatcccagcactttgggaggctaaggcaggcagatcacctgaggtcgggagttcgagaccaggctgaccaacatgaagaaaccccatctctactaaaaatacaaaaattagccaggcgtagtggtgcatgcctgtaatcccagctactcaggaggttaaggcaggagaattgcttgaacccaggaagcggaggttgcagtgagccaagatcacgccattgcattccagcctgggcaacaagagtgaaactccatctcaaaaaaaaaaaaaaaaaaaaagagaagaggccgggcacagtggctcacgcctgtaatcccagcactttgggaggccaaggcgggcggatcacgaggtcaggagatcgagaccatcctggctaacatggtgaaaccccatctctactaaaaatacaaaaaattagccaggcgcggtggtggacgcctgtagtcccagccacttgggaggctgaggcaggagaatggcatgaacccgggaggcagagtttgcagtgagccgagatctcgccactccactccagcctgggaaatagagcaaaactccgtctcaaaaaaaaaagaagaagaaagattggtagatggatggagagaaagatatataaatgatagatgatagaaaaatagaaagattcatagatataaatagacaacagaggacagagaagcataagatagatatagacggatgaaagataaacgatagatgatagacatagatagataataaataaatgattgacattctagacagatgaggcatgcgcagaatgtaggcaaggaatgttactataccttggggctcacaatggtggagagcctttatcgcttctatgccaaaagggccaagcagaggaaacaataacccagacccacagagggtaggtagctggagggagagcactgcaggtaccctgcaggcagggagccagggagacaaatacattccaccctctaatccctcacctgtgtctctcattggccaaacccaagtggaagccagagagtaaggaaacccattgatgccatctacctgggtcattctcccagagcacagagaagagttgaggaagatcagtgcagatctggaggcaaaaagcagacactcagctgttttatcattgtcctttcagtcaaaaaaccaactaggatgtcaattccaaagtccccaacccttcccaacttcagcatgccaatgaaatcacatacatatgaatccttgaatctcattagttaattttcctccatcaccagtgcaggcttcctagtcctcaacctaacatcctttctgcaatcattccagggagctcccagtgtgggtgagtctcacatgtgcttacaaataagtcagctccaccaggtacgaaagtgggttcccgctgtgggacactcttcttcaatattctgttgacatgaagccaaggttgcatgatagagtggacaaaatgggtagggagaaggactttctcctcatttgtacagcacttgggaagaagaatacccaaacttgcttaagccccagtagatattttattttttattcccaagaatctactcatgcataaagctaagatggacttctcttgggccaatgattcaagtgcaaggaatttattcgcaagatcattccagaaagctctagtaggagtgaggaagagtaggttgctgctgtgggcaactggggcttaatcccaaagagcatcctttgggagactctgtggatcatatccatgaattcccacagagagtggcgaggaagctggggtatttatccaccatctctcattcatccctcatatgttgagggttgctcctgccccacacaagagaaagttcccaggtggagagtctcaggtgttcagtcagatgctgtcagcaagcactagaatggtaagttccaagggtatacaggggtgcaccccccatacatccctcaactagcctgaaattccataaaagcagagactgggcctatataattcaccattctattctcaacaacttgtccgggagttggcacacggtaggtgcccaatacaggttagagggtaagggaataaacataaaataaagttgagacaaacctaaaagagactgtttcatcttcaaagacttagcctaaagggggtgggagaggagtaaacatttattagaagcttccacagaattcatgcttctgcaaacctgattgcccctaaatttagcacatcagtagttccaaagaagagactttaagacatgctttaagacaacaacaggtgtgaatctgcctcccagatgacaattggcaatgtctggagacatgttatattggttgtcacaactggaaaaggggtgctgctggtagctaatgggtagggaccagagatgctattaaatatcctacaatgcacaggacagctccccacagcaaagaatgatttggccccaaatgtcaataatgccgaaattaagaaaccttaggttagagggtggatacgtgaaccaattggagtcaatagaaaaatcaaccacaaggtcgagtgcgatgactcatgcctgtaatcccagcactttgggaggccaaggtggatggatcacctgaggtccggagttcgagaccagcctggccaacatggtgaaatcctgtctctactgaaaatacaaaaattagccaggcatggaggtggacacctgtaatcccagctacttgggagactgaggcaggagaattgcttgaacccggaggcgggggatgcagtgagccgagattgtgccattgcactccagcctgggtgacaagaacaagactctatcttaaaaaaaaaaaaaaaaaaaggaagaaagtaaaagaaaaatcaatcacaatactaggagtttctctcttccctggaaggagcaatatggcacctattttgataacacagagagaaggctggagctgtgtgatgtcgggaagagaggttctactgggtgccatgtggagcatgtagatgaaactgatgcccagagaaagctgtagagatgaagagaaactgagccattgttgaccacatttgagccactagatcaattctcccctgaagtaggtccttttaatttatatgagctaataaacccctttcttgtttaagccagtagacttttgtgtcatttgcaaccaggagcactccaactgacagaatcaacgaacattaaatcctatcctcctttcctgaagacaccagtgtaaacagaaccttgtcttggagcacgactggttgcgagtaacagaaacccaccgaagctggcacaagtaaagaagtatttattacatgggtccaaggttatctccaaaacccataggagcatgaagtaaaagtgaaattcatgcagaaccatgatcagatacttagaaagcaattaataaatacctgttgatctcaatggaatgaacactcaattaactggaattgataactgcactgggagccgagataacccccccagccctcaaggagccatttgagctctcatttctgattctccctgaatattagcttcattcttctgccctgtttgcttgtctctttgcccaccacctcgaattggccactgatatttctaaatctgattgtgaccttaagagctccaccaactgacaactttcttagcctctccattaaagaaagttctcgagcaaaagaatctgattggctcagcttaagtcaggtgacaaccactaatccaatcggtagtcatctgccaaaagaggaagcataagtagactggcaagtcaaatgtatttaccccaagatgggagctcaagttagccctgggtgggggagatagaagtcccactgccaccactccccaccttacctagacacagaccaacaacactgagtgttaactattcctttattaggtggtgaggggagtggggggctgtacaatgcagggcttgggaattcagctacacagggattttgaccagaagccatattacaaaaatagcctaaaaatacctctattctgccatgaggctgggccagaggattaccaggaagagaaagtaccactcaggcagctcctcttcttgtagtcccacatttacagggacacaaaggaatgcatacatctgccctggctcccatttcccaccagcagccccctagttcccaaagggagatggccaagggtggggctggggcagagggagttggcagtgggcccttccccagcaaggctatggaacatgtcccatctggaatgcagtgaagtgagggaggtggggtggggaggaggctcccaacactcccccgacccctggccccagtgggtgcgcccaagggtgcctacttggtacatacctgggtcgtgtactcggtacacgggatcccagtcatgcctgtgtactaggtacacagaatccagcttggccgaatgggcccacagactcagccccacgggggcactggggggttcacagggggagggagcatctccatatatatattttgtaaaaaataataataataagtttgtttaaatgaatttgtttctatacaaaatgtaaaaaaaaaaagaaaaataaaaataataataattcattcatgtcagagtgtaaggaaatgagaggccagaaggagagagaaaggaatgagggaagagagaagtggggaagaaggaggtcccagactcttcacaagactgagagggtgggtggtagcccccacccattataaataaaggaagactgaagccctgggctgatgacctatctcggtcacgctgcaaggcaaggatgcaggagggttggtggaaagagaagaggatgaaaaagactaaaaggaaggaagagacagagaaagaaaggaggcaggacgggggtctctttaggcccccaagatctaagaactgacgagcgtctcaggccaacacttgcctcttgggggtaacttccggctggggccccagctgggtctgggcctgagcaagggagctgggaacagacaagggaagtggctgggcaggcagtgccccagtggtggtggccatggccccagtggcagtggctgggctaggcgtggattcggaccagtctgagagggagggaggtgaggggctggcccagtgctcaggggattcgggggatggggtcaggtaagggtgctcactgggaacccgcaggaagcgggcctttggggggctgctgtgtgccccagccgccgggtactcctcgccatgtcctgggactgccaggtaaggcgggggccgctcctgcggggagacgggggtccctgggttgagcagctggggtcccggcgccagtggcagcaggaacgaggggcctggaggggcaggtgggggcagccgggcccaatcgaggggcacagccacagggttcagcaggcccaggctgagtacacatcctccagggggctggcgccctagacccgcccggcctgggccaccaagctgtgccagagacactgcagtggcagtggcagctgcatagggcccctcaagggggaagccaccaggggaagcagggggcccaccgaaaggccgcggggagtccagcgagtccacgggcgacagcgtgaccgagctgtcagccagggggcccgggcaggccagcgtcagcttcttgccccgcccccggggcccctgcggccccagccccgccttcccggggggcctcctgctcttcttggaccccgactgtgccgctttgaggccagggaggaaggcccctggaggacagagcagaggccccaggccgtggggaccgggggggctgcggggcccactgggttgatccagcaagcgcacgatgtcctggtgcagtctctcctgggctacgtcccgcggcagcctgtccaggtggtcggtgatctcacggttggcaaagtggtccaacagcagcttggcagcctcatagctgccctcgcgggcggccaggaataggggggtctcctcctggggggccagaacccacagaggtcagcgaaaccccagctaacagtagcaaagtcttccagcctcttgggggagcccgagagctatgagtttgtacactggagcttgacagacctgggttaaatcccggctgtgctgggggagcctggacaagttctttcctctaaaccacattcatccatcacctactaagtgccagaggtcaaggccaggactagggtgagttaagcgaggtactcaccttaggcataactttttttttcttgtctttttttttttttttttttgacagagtctcactgtgtcgcccaggctggagtgcagtggcgccatttcagttcactgcaacctcagccttccgggttcaagcgattctcctgcctcagcctcccgagcagctgggactacaggtgtgcaccactacgcccagctaatttttgtatttttaatagagacagggttttactacgttggccaggctggtctcaaactcctgaactcaagtaatccacccatctcgacctcccaaagtgctgggattataggcatgaaccaccacacccagccattaggcacaaaatttaaggggcccccaaaaactttagtcaccaaagtaaattatattttaatccaatgtttggggttttattttgttttgttttttgagagagtctcactctgttgcccaggctggattgcaatggcactgtgccactgctgacacccagtggaccaagggctggggctcaccttgctatcctgcatgtccttattggctccatttttgagcagggccaaagtggcttccacgttgttcacagccgcagcccagtgtaaggctgatttccctggaggatgaaggggagagaggtcaggaccaggcacctgtcctggggcccccatgtcagggaggcagaaattgtctagaatgtggcctaggggtagaggaggcaggcctgccgtgaatatccaagtacttgtgtctggatccatgtgtgtgcaaatctgcaaaatgactctgtgcaatggggaagcactttgtgtctgtgtgtgtgtgtttgtgtgtgtgtgtgtgtgtgcgtgcatgtgcatgactgtttatacacagggggtgctgtgtggacctccttcagttgaacctagggttgtgacatccaatacagtagtcagtcacatgtggtttttatttatccatttatttatttttgaggtagtgtcttgttctgtcacccaggctggagtccattggcacaatctcagttcactgcaacctctacctgctgggctcaggcgattttcctgcctcagcctccctagtagctgggactacaggcatgtaccaccatgcccagctgattttttgtatttttgatagagatagagttccactatgttgcccaaactggtctcaaactcctaagctcaagtgatccaccagccttggcctcccaaagtgttgggattacaggcatgagccaccgtgcccaacctacatgtggttctttagatttaaatttaataaaataggtgccaggaccattcaatggggaaagaatggtcttctcaactaatggtgctggaacaactgaatattcacattcaaagaatgaagttggacccctacctcacactttatacaaacactaactcaaaatggatcagaaacctaaatatatgagctccaactatagaactaaacatctagaagaaaacataagagtaaatcttcatgaccttgaattaggccaagattcttagatgtgacaccaaaaccacaaataacaataacaactacaaaacagataaattggacatgatcaaaattgaaacttttggccaggcacagtggctcacgcctataatctcaacaatttgggaggccaaggtgggagtattgcttaaggccaggagtttgagatcagcctgggcaacaaagtgagaccccatttccacaaaaaatttaagaattacccaggtatgctggcacacacctgtaataccagctattcaggagggtgggatgggaggatcacttgagcctgggagtttgaggctgcagagagccgtaatcatgccactgcactccagcctgagtgacagagtgataccctatgtctaaaaataaaagaaaaaaaaagtggtccatcgacacaatggattattattcagctgaactatgctacaacatgggtgaaccttgagaacataatgctaactgaaaaaaaggcagacaaaaaagaccacgtatcatatgattacatttatatgaaatgtccagaacaggcaaatccatgaagacaaaaagcaaatcagtggttgcacagggctggacagatgaggggcttggcagatgatggccaagtggtgagaatttatttttcaggtgatgaaatgttctaaaattgattgtggtaatagttgtatgactctgattatactaagagccattgaattgtacactttaaatgggtgaattgtatggcatgttaattatatctcaataaagcagttttttgttttttgttttttgtttttaaaaaaaaggatggactcagtggctcatgcctataaccccagcactttgggaggccaaggcaggtggatcacctgaggtcaggagtttgaggccagcctggccaacattgcgaaaccccgtctctactaaaaatacaaaaaaatagccaggcatggtgatgggcacctttagtcccagacacttgggaggctgagacaggagaatcactggaacctgggtagtggaggttgcagtgagccaagatcacaccattgcactccagcctgggtgacaagagtgagactctgtctcaaaaaaaaaaattaaaaaaagggcaacataaggagaaaaaaattaaatgaactaaaacatttacttcttcatttgcctcagtcacatttcaagtcactatatgtggccagtggctactatactggacagtgcagagaataattccatcatcacagaaagtcctattggccagccctgccctagaactgtggctctcaactaggagaaactccctgcccccagcccccagagcatttggcaacgtctggagactgttttttttttttgagatggagtctgtcccccaggctggagtgcaggggcacaatcacggctcacagactcaacctcctgggctcaaacgaccctcccacctcagtttctggagtagctagggccacaggtatgcaccaccgcacatggctaatctttcaaaaaacttttgtagaacccactatgttgcccagtctggtctcaaactcctggcctcaagtcatcctcctgcctcagcctcccaaagtgttgggatcacaggcatgagccaccacacatggcctgatgtgtacgtttattataataacttccagcaggtggaagtacagtgtgtccgtctaacaaagcaggtggaaatgaagtatctaggggaaaggcacctttttctaaatccctgaggcaccctaaggactagtggtgaccctgcatgaccctgcaggcttcatgaagcctggttatgtgtgcgtgagcttcagtgattgggtctcaacatgggtatgaatttgcaccaacatgaccctcagggcccaggtgacaccaacccagcttagacttgattcctctgccaacctaccaagctcatccacagcattgacatcagcatggctggcgatgagctcttccaccatgccctctactgccaggcgggccgccaggatcagtgccgttgagccatctgccatgcgggcatccaagtctgtagagcggtttcggatgagaatctaggacagagagtggatgcagcaggaggggtcatggcaggaacagaggaatcaggagcacccctaagtcccatgaagtccccaacccccataccccaacccctgaaattggtgaggttcagggagcagctgcttgacagatactgtattcccatatatccccattttccaaatgagaaaaaatgagtctgaaaggcagaactggggctcaaacccaggtaagtctaatgcctgccccagctctgaggtccaaagtgtgtgcctatctcacctggaagacaccctgggcatcggctgtgacagctgtgtgcaggggagtgcggcctgagtggtcctgggcattggtgtctgccccagcatccagcagccgcttggctgcatcagcacgggcataacgggcagccaggtgcaaagcagtctcgccagtacggtcagtccgtgccccaagctgagccccctggcagatcaggtcggagatgatgctagctgatgtgtcatctgcctcatcctcttcagttggcattggctccagagcccccccacagaaggaagccagcattagcggggtgaagccatctgcagggacaggagtgtgtcagcaggaaggtaaacacagggccttttccaggaaatgttatcaagggtaccccattaggagctaatgggacacatggaaaaatgacaattagcagatcctcctgtctgcacacccacacccagaatgaggattcgtgggcacgtgatttgtcacagaactactcctagggcacagggaacacaggacaagggactctgggagtcaagcaagtgtgcaacctccagtaaattcccaaagggttattccaccttgatcctccaaagggactctggaacatgtgttgtaccccagagttctaatccaactcaaggcaaagaaaccatccccttcatactcctgcacccactggttaggagctgcccctttctgccaattcatttgagtgttttaaaagggggggggaaaaaaagagctgcccccagggacataaaatcccaggcacttcaggccccagcagccagagggacttcaaaagagagccataagtacaggccatttggagcataagcaaaatgaagctaaggcaggaatgccctgaaacataacaaagatggatctaagaggatcaaacaacatagtccgctacactgcacacactgtacacaagcacttgtcctcatttttcttagggagccacttgcatccggttctccattctcaagccctgggtagagactgacctccccgctccaccagcagacccgacccccaccagctcaaagacaggtatgtgaatcaggcttggtcaatttgcatattccagccccctggtcatactgattggctcaaggatgagcacgtgaccctagtctgtccaatcagaatgcatcctgagacttttctggagcattaagaaggttttgtaagattggagtcaaagggtagagaggggaaaactgagtcctggatccaaatgtgccacttttagttaaatgagttgataaatcccttgttttacttaagctagtctgagttggacctttgtcacttccaaccaagagtgttgctgaatacacacacccttcacagaagcttagagactcccccagttctccccaaaacacagagtcagaaataacctctcacaggtaggatgggtgaggggcatccctttgggaggggcactgtcactaacctgggccacgcacattgacatccatgccatcagcatctgcgtcgccctgtggtggtgtcagtgccatggctggtgccacgcggatgtcagcagcaaccagatggtgttgagtccactgacggcaatccacagcctcctcagcccccatgcctggctcctctacctggaggggcaggcaccctggatctcagatctcaccctttggtgctggggagagccactgccagggatggggctgggcattcctacaggtttctctttaggagatacacacagagccctgggaaatcatttaccatctgtttggtgttttatttgtttttgagacagagtctcgctctgtcccccaggctggagtgcagtggcatgatctcagctcactgcaacccccgcctcccgggttcaagtgattctcctgcctcagcctctggagtagctgggattacaggcacatgccacggtgtccagctaattttttgtatttttagtagagaaggggtttcaccatgttggccaggctggtctcgaactcctgacctcaggtgatcagcccctctcagcctcccaaagtgctgagattaacaggaaatcaatgtgtgccatagcccaaggaggtaataaaaggaagacacaaggtttctttttttttttttttttggtctttttgagtaataaatggctttaattatttatgtatatattttttagagactgagtctcactgtgtcactcaggctggagtgcagtgctgcaatcatacctcactgcagcctcaacttcctgggctcaaatgatcctcccacctcagcggcccaagtagctgggactataagcacacagtataagcagattgggatagcatctgatccaggttcaagttccaaccccaccccttagtagctggaaggctctgggcaaatcactttgaagctctgagcttctcattggcaaaatcaggatgacgcagccattccaccatgctaagataccaccacaattacattgggccacccctttaatacctctaatacctactttgggatgggaaggcagaaggaaaagtctgggttgagcaggtttttttatctgtccactgtaatagatgattccatttcacaacattaaaatatggacagaggaagggagtttgtaaattgaagtatatgtcaatagctactttacagcgtcctcagagagatgaaataagatgttttatgtgcattagagacattcagcgggtgcctcagtaatgctagcaggatctgtatggactcaattgtgccccctctaaaaatcatacaatggccgggcacggtggctcacgtctgtaatcccagcactttgggatgccgaggcgggtggatcacttgaggtctgcagcttgagaccagcctggccaacatggtgaaaccccatctctactaaaaatacaaaaattagccgggcatggtagcacatgcctataatcccagctactcgggaggctgaggcaggggaatcacttgaacctgggaggtggaggctgcaatgagccaagatcacgccactgcactccagcttgggcaacagagtgagacctggtctcaaaaaataaataaataaataaacagaaatcatacactaaaaccctaaataatatataaaatttccatgtgcctgcatttgaagataggactttatttttagacagggtcttgctctgttacccaggctggagtgaagtgatgcagtcatagctcactgcaggctccaactcctggactcaagtgatcctcctgcctcagcctcccaagtagctgaaattactggtgcaagctaccaagcctggtgagatagggcctttaaggaggtaattaaggttatatgaggttataaatgtgggaccctaatccaataggattggtatccttacaagaagaggatgggatgtcaaatctgtctctctctctctctctctctctctctctctctctctctctctcccctctgtgtacacagaggaaaggccatgtgaggctacagtgagaaggcggccatctgcacaccaggaagagagcccttaccaggaaccagccctgacagcaccttgggcttggacttccaacctccagaaccgtgaaaaaattaatttctgttgtttaggtcacccatgctgtgggacttttttttttttttgagacggagtttcgctcttgttgcccagtctggagtgccaggttcaagggattctcctgcctcagcctcccaagtagctgggattacaggtgcccgccaccatgcccagctaatcttttgtatttttagtacagacggggtttcaccatgttggtcaggctggtctcgaactcctgacctcaggtgatccacctctgtgggattttttaatggcagccaaagctgactcatactgaacccaggggcatgactccatgagctcagaaccggctcagagcactttcaggctaagtccatgctggacaaaataggaactgacagagataaggcagactcgctctctgggctggggggacacctccaggaagagtgcaggctggccaggaagcaggatcctggctggggaggggcaggatggaggggaggattttccacctgcccggagggacccttggggccccagtggcaaatcttcctccctctgaggtcacagaaccacactgagaagaaagggttgcaaagctgggactattctctggagctagggaggtggggacagcggtgccatcccctgatcacgcccatcatccactggggaccccacccagtaccctgaggggaggggtcagaggagggggcaaaggtcagagggggggcagtacctttagccgcttggcctctgggcactctgtgtccatccagtctgtggccacctcccccatcaggctctcacccttggccatgttcctggcggacaatgggaagaggggatgtgagggggacactagaggtgtccagctgggaaggaggatttggggtggggtcagaggtctgagtcaggtcaaggcggggtccagggttcacaaggtccccgtagtcagggacagggagcgagcagggttctcacttcatgcccagcgcgtcctggcccacgggttcccgccggcccttgtgaccagaggccacgtccttgtgcagtgagaagccctcagggaaccagagggtgctgtgctcgcgcttgcgccgggccaccatgacacccaggacgagaatgaccagcagcaagacagcgcccgccactagcagtggcagcagcgggacgctgggttctggaggctccagcggctcccctaagagcaggaagcagagggcggggcttcagccgagggcggggctttggcctcaggcggggcttcggccgcccccagctccgcccccgccaccccctccccaaggcagggccgcaccccgcacgtcccgcagtgggtacgggaagtccaggcgctccaccgctgacaacgctcccaggtagtcagcggcgctctgggcatcggggaagcagtgatcattctcaggcgactgcaggcagagccggttgtcaatctccagcattactaccgagctgcagggacagcagggagggaccagagggctcaaaaattgcccgatgcaccccctggtaccaagccccactttccctccccagcgcctggctctgaagcgccatctccacccacaggtctccatggcccacctgcatccacctggcatccaaccccactgcacccctaaaacgtgtcttgctgtggtcagcagtccccccagagccatgaatccaatggatattattttttgatcttgcaccgaggctggagtgcagtggtgcgatctcggctcactgcaacttcccctcctgggttcaagcgattctcctgcctcagcctcccaagtagctgggattacaggcgtgtgccaccatgcccagctaatttttttgtatttttagtagagacggggtttcaccacgttggccaggctggtcttgaactcctgacctcaagtgatcctccctgccttggcctcccaaagtgctgggattacaggcgtgagccgccactgtgcctggcctgttttttttgttgtttgtttgttctgttttgttttttgagacggtttcactctgtcgcccaggctagagcacagtggcgaaatcagagctcactgtagccttgacctcccgccttcaagcaatctttccacctcattctcccaaagatctgggaccacagacatgtgccaccacacctggctaatttttggggggggttgggggtggaggcatagagattaggtgtcactatgttgcccaggctagtcttgaactccggggctcaagcaatcctcccacctcagcctcccaatgtgctgggtttacaggcctgggccactacgcccagccaagggacattgtttgttttttgtttttgagatgaagtcttgctctgtcgacaggctggagtgcagtggtgcaatctcagctcactgcaacctccgactccctggttcaagtgattctctgcctcagcctcctgagtagctgggattacaggcacgcgctgccacgcccaggtaatttttgtatttttagtagagacggggtttcaccgtgttggccaggacattgtatttgtttgtttgtttgcttgttttgagacagagtttcactcttgttgcccaggctggagtgcaatggtgctatctcagctcgccacaacctccacgtccagggttcaggcaattctcctgcctcagcctcctgagtagctgggattacaggcatgcgccaccacgccccagtaattttgtatttttagtatacacagggtttctccatgttggtcaggctggtcttgaactcccgacctcaggtgatccacccgcctcaacctcccaaagtgctgggatcacagttgtgagccatcacacctggcctcttcctcttttttgagctaattccattcatccaatccttaggtctccgtgtccccagattaattcttctgttccttctctccccactcctttgagtccctctcatggcttcaatgatcatcaacacttttatatctttcttgtttgtgtctttagcccccaggtatctccttggaggccttcccaatacttccaggtccctcagactctgcaagctccaaaatgacctgtttttcactttgtggccctatcactcagcttagccaggggctggtacaccaaccactctccttcatccctctacccctccccttccaccacccacatcccaatatctgcaaaacccaaccctcctctctgtatcagagacccacccctctcaggtctctgccttctcctcaacaatagctacacctcccttctggtacctctaccaggccactagcaggatacttctatattttttctttttctttttttttttttttgagacagagtctggctctgttgccccggctggagtgcagtagcacaatcttggctcactgcaaccttcacttcctgagttcaagtgattctcatgcctcagcctcctgagtagctgggactaaaggcatacaccaccacgcctggctaattttttgtatttttagtagagacagggttttgccatgttgcccaggctggtctcaaactcctgacgtcaaatgaactgccttccaaagtgctgggattacaggcgtgagccaccgagcccctcctatttctttcttcttcttcctcttcctcctcctcctccccctccccctcttccttcttcttcctcttcctccccctccccctccccctccctcctccctcttcttcttcttcttcttcttcttcttcttcttcttcttcttcttcttcttttttttttttttttttttttttaagagatcggaggccgggcatggtggctcacgcctgtaatcccagcactttgggaggccgaggcaggtggatcacgaagtcaggagatccagaccatcctggctaacacactgaaaccccgtctcttactaaaaatacaaaaaattagccaggcatggtggcggccgcctgtagtcccagctactcgggaggctgaggcaggagaatggcatgaacccgggaggcggagcttgcagaaagccgagatcgcgcctctgcactctagcctgggcgacagagcgagactccgtctcaaaaaaaaaaaaaaaaaaaaagagagagagagatgggagtcttgctatgttgcccaggctagatttgaattcctgggctcaagtgatcctccaagtagctgggactacaagaatatattgtgcccggctttatcttctatgtctttaagaagaagaaaattagcccggtgtggtggtggatgcctgtaatcccagctactctggaggctgaggcagagaattgcttgaacccaggaggcagaggttgcagtgagctgagatcacgccactgcactccagcctgggcgacagagactccgtctcaaaaaaaaaaaaaaaaagaaaagaagaaggagaaggagaaggagaaggagaaggagaaggagaagaagaagaagaagaagaaaaaaaccctacacatgtatttaaccactctgccaagccacttagcaacctgcctccccacaagccagcactagacctgggcaattctaccccagaagcactagctccatctggaggcattttttgcttgtcacagccaggaggcggtgctcctgacatctggtgggtaaaggcattaagtgaaatgaaacacacaagacctggatcaacagcatctctcctctccccagccaccacggcttttccaggtggggtcactcacccgatcacctcgggggccagctcccgacgggcccggggttcggagccaggactaggccggtggtaagggaagaccatggcctggccgtgcgcgtccaggcggaagcgcagcgaggtgcgcaggatggcgctgagccgctgcagaaagtcggcgctggaacgcagtagctcctctggcggcagcagcactgtgagcaccagcacgccgcgggccagcagggccggcacctcgctggcacaatccagcccatcccagccgcactcctccgtgttgcagccctggtcgcagcggccgtcggcaaagtggtcggcgcagtacttctcgtacaccgggctggtggggaagggtgaggcagagaggggcggagtcaggggtcagaggagacaatccccttccatgcattcacaccgtagagtacagagactccagacaaggcttgcacaggggactggaatatacggacccatgccaggctttctgcaaatcttgccattcactggataattttttttttttttttttgagacggagtcttgctctgtcgcccaggccggaatgcagtagcatgatctctcagctcactgcagcctccacctccccggttccagcgattctcccgcctcagcctcccaagtagctgggattacaggcatgcaccaccacgcccgtctaatttttgtatttttagcagagacggggttttactatgttggccaggctgctgttgaactcctgacctcaggtgatccacctgcctcggcctcccaaagtgctgggatcacaggcataagtcaccgcacgcagcccttgataatatttttttaaattgattgattgaaatggggtcttgctctgttgcccacgccggagtgcagtggtgcaatcatagctctctgcaatctcaaactcctggactcaaattatcctccctcttcagcctcccaagtagctaggactacaaacccacaccacactcccggcctcactggctaactattaattaatcagtaaatactaactgactaccatgtgttgggcactgctgcaggcacaaggataaggcccggccacaattcctggtccacgtgcagctggcattccactgggtgaagacagatagtaagggagatacatgagccaaatatacagcatctccattactcatcaataaaataaaaatacaggctgggtgcggtggctcatgcctctaattccagcactttgggaggccaaggtgtacggataacctgaggtcaggagttctaggccagcctggccaaaatggtgaaacccccgtctctactaaaaatacaaaaattagtcaggcatggtggcgggcgcctgtaatcccagctactcgggaagctgaggcaggagaatagcttgaacccaggaggtggaggttgcagtgagccaagatcacaccactgcactccagcctgggcaatgggagagaaatcctgtctaaaaaaaaaaaaaaaaaaaatacatatatatatatatatatgtatatatatgtatatacacacacacacacacacacacacgcacgcacacacatagtgctggatggaattaaatgctaagcagaaaaataaagcagaggaagggctgggggtgaccagggaggtgctcactgagaaggtaccaccatttcagcaaagacttgaaggaggtgagggaggagccatgtgggggaagggaacagccaggcagtaggaacagcttgtgcaaaggccctgatatgggatcaagcctggggtatctgggaaacagcagagaggccagggtggctggaacagagtgagtgaggggaaagcagagaagatgaggatgtggagattaagggggtggagggttccaagcagacagagaggtacgcagaggacagaaggggcagggtgtagggatggacagatggactgcctaggacagacagagagaggggcagaagaggggcagagatagtcaggggcacccacagatagccatatagaggagcaaaaagagtgcatggatggacagattcggcccaaggatggacaaacaggagtggaggaagacagttgggtacacagaggaacaaaagcaatttttttttttttttttttttttggtgagacagagatttactcttgctgcccaggctggagtgcaatggcacgatctcagctcacctcatcctccacctcccaggttcaagcaattctcctgcctcagcctcctgagtagctgggattacagccatgtgccaccacacccggctaattttgtatttttagtagagacggagtttcaccatgttgcccaagctcaaactcctgacctcaggtgatctgccctcctctgcctcccaaagtactgggattacaggcgtgagcactgtgcccggccaataaaaggaatttttaggctagatgtggtggctcaggcccacaatcccagcactttgagaggctaagctgggtggattgctttgagctcaggtgttcaagactagcctggacaacatggcgaaaccccatctctaagaaaaagcacaaaagttacccgggcgcggtggctcacacctgtggtcccagctcctagggaggctgaggtgtgagggttacttgagcccaggaggtagagattgcactgagccaagatcacaccactgcactccagcctgggccacagagcaagaccctgtcttaaaaaaaaaaaaaaaaaaaaaaaaaaggagccaggtgcggtggctcacacctgtaatcccagcactttgggaggccaaggcgggcggatcacaaggtcaggagttcgtgagcagcctggccaatatggtgaaaccctgtctctactaaaaatacaaaaaaaaagccaggcgtggtggcaggtacctgtagtcccagctactcggaaggctgaggcaggagaatcgcttgaacccgggaggcggaggttgcagtgagccaagatggagccattgcactccagtctgggcaagagagcgagactccgtcttaaaaaaaaaaaaaaaaaaaaaaaggaattcggctgggcacggtggctcacacctgtaatcccagctactccagaggctgaggcaggagtactgcttaaacccgggaggcagaggttgcagtgagccgagatcgcgccactgcactctagcctgggccacagagcaagactccatctcgggaaaaaaaaaaaaaagtaattattggatggagaaaagggcagacaaacggggcagagaagtgcataggcagatagaaacaagaacaagatagacagagcacatggatgaacagacacacggacagacacgtgggacacaccgatgggcagatagagtgcacagagaaacagacggggcaagtggatgggcaggtggaaagagaggcagggcccacggacaaacagactgggatggatgcatagacagacggatcgatcgggtggatgggctcacttgcaagtgcgctcgcggccaccggcgtggcagtcgaagttgtcgtagaggcaggcgggcgagctgcaggcggggtcgcagcggctgttgttgaagaggcgccagcactgcagcgcctcgcattgccgccaggggtcgcccacgctcagcgagcagtcgccgccgtcccagccgcagcctgggctgttgcactcgcggtcgcagcgctggtccccgcgcttggcctggcaggcggcgcgcgggcaccgcggctcctccgagacctcgggtgccgcggcgggcgcctcgcagcgcggcccggtccagccctgcgcgcaagcgcagcggaagaagggcgcgagcggcgcggggcggcaggagcccccgtggagacagggggcggccgcgcagctggcgttgctggcccccggcggcgaccccgggaagctgcggcaggagggtcccgacaaccctggggggcaggcgcagcgcggcccgcggggcgtctgctggcatgggacgcccaccgggcactgcagctcccggcaggagcgcgccacccgctcgcaacgcggaccccagaacggctgggggtcgggtttggggagggagggataaaaatgagggtggggagtggagggaaggaggagaagaaatggaggagtggggaaaagaagagtcaaggggagagagggggaagagaagaggtcaagactaaggaaggttgagaccccctcaacctccccatgtcccacccaaccgctcccctttccacactggagaccccacctggcagataagccctgccatcccaggaggccacgccccccaatcaccatcctcacccttttcccttcaaacctccaggaaatgtcggggcagggggttgtttctttgttttttgagacggagtgtcactcagtcgccaggctggagtgcaatggcgtgatggctcactgcaacctccgcctcccgggttcaagtgattctcctgcctcagcctcccgagtagctgggattacaggcagctgccactacgcccggctaatttttatatttttagtagagacggggtttcaccatgttgcccaggctggtctctaactcctggcctcaagtgatcctcccgcctcggcctcccaatgtgctgggattacaggtgtgagctaccacacccggcggaaatgtcagcattttccagaaactcccttcccttcgatgtctcccctaaagccacatcctcctcctagacgccacgcccctactactccagaggccacgcccctactcctcctccaaaggccgccacccacacctacctgggcacagtgacaggtgaaggtcagcccacccccaggacccgggctaggacggcactggcctccatgctggcatggctgggactcgcagggagacaggacagtctgacagcgaggacctgagcgagcgggagcatgtagatcagccacaatgggggaatgacaggcggggtcccaggccagccccttcgccaacgcttacctgagaagccagcatgacaaaggcaacggaaacctccgcctgggtcctgcaggcagtcccgggtgtgtgccgcgtggcaggcacctgagcgacactcattgatgtctgcctcgcagcgcaaaccagtgtatcctgggggacaggtgcagcggaaaccacccaccaggtccacgcaggtgccattgtgtaggcaccggggccctgagtccagcggtgggcctgggccgcagtcatcctcattaatctcgcagagcacccctgggggaagaaacgaggggtggtcaagagggaatgaagacagcctctcatcctgtccccccaaccctggccctggcatacccagcgttcctgggggacaggagcagagatagcgggccacgaggtcaatgcatgaacccccgtgctggcagggctgggaggcacactcgtccacgtcgtcctcacagttatcaccattgtagccaggaagacacttcagtggggtaagagagggacccactcagcttagtgggacacagacccacctggacatacccatgaagacgcaaagaaccccagcacaaaaggacacacacagatgttcagcgcactaccagtaggtaatcccagcactttgggaggccgaggtgggcagatcacctgagatcaggagttcgagaccagcctggccaacatggtgaaaccctgtcactatgaaaaatacaaaaattagctgggcgtggtggtgggtgcctgtactcccagctataatgagaggctgaagcagaagaatcacctgaacccaggaggcaaaggttgcagtgagctgagatcgcgccactgcactcgtctgggtgacagagtgagaacctgtctcaaaaaaacaaacaaataaaaaaacaccccagatctacccagagtgacacccacagatacaccaagagtcacaaaagcaaaaactcagacatatctagagacatacccataccaagccacacagaaatgtgtgcccagacgcacccaagcatgcccacctcctcttccctctcctggggagcgcccccttacctcacacatgtagccccccatatagccacggcaggtccccccatgctggcagggctgggccaagcaggggtccacctcctgctcacagtggctaccagtacggccctctgggcacacgcagtagtgggagctgtcttcatccacacactgcccacccgcctgacacagctgctccagccgcacccctgcaaagaggagagtggcacaggaacagaggtaaccccatacatcccccttctgcctccatcacacagatcattcaacatccttggtggaatgagtccccaggatcgcacccacactccatcaggttgtcacacatccccccagcaggcaaggtctcatcactgacatacacacacatgccttcaacgctcacagcagctcggtcacaccctgtagcacacacaccatccctgctgtctcacagtgacagacacacaccatcccggccagttgtcacatgctcacacacccacaccactcagccacacaccccatcatgccccataggctctgtggcacccccattcggctcacactagcaggaggtacgtgcatgagccccttcccaaggccccacacgcccgcccacatgctcccactcaccgatctgggctgcggcctccctgcagggcaagcttcggatgtcacagaggcgtccgctccatccagggggacaaaggcaataggccccagtctggacgcagcgacccccgttttgacaaggctggcggctgcaccaatccaccagcgtctggaggggaagcactcagagtcagtactgtggggtggggggtagtctgggagaaactgtgccccgacttggcttctccctcctaggatcccaggcaggctcctcccccaggtccccagtaactccacccacctggcactgcgggcccgtgaagctctcgaggcaggtgcagcggaagccagggtgggcggcgctgcagacgcccccgtgtaggcagggccgcgagaggcaggggtctgcctcatgttggcagtgggctcctgtgtagccgggacggcacaggcagctgaacgagttcacgccgtccacacaggtcccgccattgaagcaggagctggagcggaaggagtgggagggaggatcaggctccgccccctcacaggccctgccctccttcctgagtcccgctgttagcgctggggacgtcccactccctgacccttatctcggcaagaagctgcagccccagcagaagccaatcaggtcccttagctccaattcaccagggacttcagccctaaggtgagagccacctggaagccatgccctctcaggcaccagagactccaaggtgagctccaaacagacgccctgctccttccctggccctgccccatcagtcatcagagtccgcagtgggtaccaagctgaggactcccccaagtcgttgctgtccccacttcgtcccaggtcccaggccccatcccaagccagagtccctgctctccaagcagaggccccgcccacctggggctgcagtcgggcaggtcctgttcgcagtggaagcctccgtagcctggcgggcaggtgcaggtgaaggaggccacgtggtcggtacaggtgcccgggccgcaggggttgctcaggcactcatccacatcgcgggcgcatcgtgggccggcgaaaccagggaggcaggagcaggaaaaggagcccacgccgtcttggcacgagccaccgttcaggcatgggtctgcggacaggaggaaggcggtctggtcacctaccttgcccccattagcccagtctgactgggatatgccttggattgagaagaattcaggaggaaaccaggttcaactgggatggggtgcatttggtcagaggaatctaaatccatccccttctgtggcctcgtcccctcctttatctggaaacctcacctatgtggcaagggcaggatgttgggaaaaccaaaaggtccctttaagctgccaagcaaacgctgctaattgtgcctgatctaattcctgtgcttggaacaggacaaggacagtggccattagccacatgtggctactgagtccttgaaattgtgactaaatggagatgtgctataaatgtaaaatacatactgggtttcagattttgaagacttggtatgaaaaaaaaaataggctgggcgtggtggcacacacttgtaatcccagcactttgggaggccgaggtgggcagatcacttgagctcaggagttcgagaccaacctgggcaacatggcaagaccccatttctataaaaaatacaaaaattagctgggcatgatggtgcacacctgtagtcccagctagtggggaggctgagacgggaggatcacttgagcctgggaggtcaaggctgcagtgagtcatgatcgcaccactgcactccagtctgggcgacagagtgagaacttgtctcaaaaaaaaaaaaggaaacaatgtaaaatatctcattaacaattttatactggttacatgttgaaatgatatgttaatatattgggttaaatagattatatacatttatttatttatttatttatttacttttatttttatttttattttttttgagatggggtttcgctcttgttgcccaggctggagtgcaatggcacgatctcagctcaccacaacctccgcctcccgggttcaagtgattctcctacctcagcctcctgagtagctgagattacaggcatgtgccaccacgcccagctaattttgtgtttttagtagagacggggcttctccatgttggtcaggctggtctcaaacttctgacctcaggtgatccacctgcctcagcctcccaaagtgctgggattaccggtgtgagccactgcgcccagccgattatatacattcaataaattaaatttaaatatattaaatttggtcaggcacagtggcagcagtctgagagtccaaggcaggaggatggcttgaggccaggagtttgagaccagcctagacaacgcagtgagaccccatctctacagaattaaaataaaaatattagctaggcatgtagtgagtgcctgtaatcctagctactcaggaggttaagacaggaggaatgcctcagcccaggagttcgagactgcactgagccaagatcgcaccactgcactccagcctgggcgacagagcctcactctgaatacataataaataaataaatataaaatattaaatttaatatctcccatttctgtttattttttaatgtggctactagaaaatttaaaattgcatatgtggcttgtgttatttatctgtttggcagcacccctttttgtttgtttgtttgtttgtttgttcgtttttgagacggagttatgccttgttgcccaggctgcagtacaatgacacaatctcagctcaccgtaatctccacctccaaggttcaagtgattctcctgcctcagcctcccaagtagctgggattacaggcatgcgccaccatgccctgctaattttgtatttttagtagagatggggtttctccatgttggccaggctggtctcaaactcctgacctcaggtgatccgcccaccttggcctcccaaagtgctgagattacaggtgtgagccacctcgcccggcctctggggggccttttatctcatactttgcacatgatattaactcgattgctctcaaagacagtgcacttaggtcgggtgtggttgctcacgcctgtaatcccagcactttgggaggtggagacaggtagattgcttgagcccaggaattggagaccaccgtgggcaacatggcgaaactccgtctctacaaaaaacacaaaatattagctgggcgctgtggtgtgcgcctatagtcgcagccactggggaggctgaggtgcttgagcccagaaggcagaggttgcagtgagcgatgattgcaacactgcactccagcgacagagctaagactctgtctcaaaaaaaaaaaaaaaaaaaaaaaaaaaagaggcagcacacagactccaaggttctaagcccagctcattccctaactcgttccatgggcttgcacaagaagtcactcaacctcctcgggcctcagtttccatataaataaaacgggaaaagtaagataactgtgaagatgaaatgacagcacagtgccaggcacacagttcaagcttaatgactgtgttccccagagcagcacccccaagagctcccctgcactcactggggtcacagtcattgatgtcctgatcgcaggaagggccagtgtaccctccatggcaggtgcagctgaaactccctgccaggttggtgcagataccatgagggccacagggtgcggggccagcacactcgtccacatcctgctggcatcgtgggcctgggggtagggagcaaggttacacctagggttacagggtacagagcagggtctcagggacctggggctcaggaagaacctgcaggccgagatgggtgaaggcaaaataagccgtgctgtcattcgtgtctgggcattttgcatatgcagtttcagaatggccgtctccctgtctcagtaggtggcaaatacctactatgaggtctgctcctccaggaagctgtaccctaaaccccgccctaagtcccagcatctctagccccataactcttcctcttccaagggctgacccacacaggctgcatatcagtgtccagctctgtccttccaagaaggaagcccctctcaaaggcagggctggggatgggtccctctctggatccccagcatcatccctgatagggtagggggcagaggagatggagaggaggagggaagagaagcaggtggcataccttgccagccctgggggcaggagcagacaggcagctggccaggggcagactcgcagcggcccccatgctcacaggggttcggggtgcagggggagaggagttcacactgacgtcctgttgggggtggaagagagggaagcagagatagccttgagggactccctgatcccatctccccccacctcccccaaccccagggtccccaccttgatacccacctcccaagctcctggagggaaatgattgaaagcaaaaaagaagctaacatagcgggaggagagagtagaggagaagagagatgagaaggcccatggtgttggtggggctgcagagggaaggtgaggtacacaccctggacaccaggcgggcaggtgcagtggaaacccattccatcgctgctgcatgtcccaccggccctgcacggctgggactcacaggcgtctcgggccaggctctggctgcagcgggggccactccagccaggctcacacacacagcggaacctggcaggggaaggtagtcaggccagggaggtgggccagggagagggggcagtgtctgaggctgagaagggccctcacccgccaggtgcatcatagcagatgccgtgactgcagggctcatgggcacagggatggctcggggggaggcagagtgggggcaaggagccaggcgggcagaggcagcggaagccattttccccatccacacaggaacctccctcgccgcatgggctggaagcacactcattgatctccacgttacaaaggggccctggggagtacacaagcaatctcatctcagaacaaagtcagcagggacaaccagggagggacgacgtgaccccacttagcacacccacacccccgagcaatgacctctttttcataacgcatcagctcttgtgcagattaggacacccgcctcctcaaccaagagctgacttgccccagatcattctggtccccaaacttccatgaagtccctttctttttcttttcttcttcttcttattttttgagatggggtctcactctgtcgcccgggctggactgcagtggcatgatcatagctcaccacagcctccacttcctgggctcaagcgattctcccacctcagcctcccgagtggctgggactacagttgcgcaccaccacgtctggctaattgtgtgtgcatgtgtgtgcgtgtttatctacgtattgactaatctggctttgggagtgtgtttattttttgtagagacagggtttcattatgttgcccaggctagtctcgaactcctgggctcaagtgatcctcatgtctcagcctcccaaagtgctgggggattacagacatgagccaacacacctagcaaagtcacattcatttccactaaggattagtttagacccattcagaaataacctagtcactgagtttggacactttcatctatgttccagaataatctttttgtttgtttttgtatgtgtgtgtgtgtgtgtgtgtgtgtgtgtgtgtgtgtgtgtttgaaatgaagtctcactctgtcgcccagactggagtacagtggcacaatcttggctcactgccgcctccgcctcctgaggtcaagcaattctcctgcctcagcctcccgagtagctaggactacaggcgcccaccaccacacccgactaatttttgtatttttagtagagatggggcttcgcaacgttggccacgctggtctcgaactcctgacctcaagtgatccacttgccttggcctcccagagcgctgggattacaggcgtgagccaccgcgcccagcctgcagaataatctcgaaacaaccttatgccaatgagacagcacagactcagggcaaagcacggacaacctcgttggacaagagtctgcaaagatacgggcaaaacaggcccacagagacgagtgacttcaccctcgatctaaggaccccctctcatggcagccacttgcccacctgtgaagccaggttggcagacacagtcgtagcggttgatgccatcacggcagactccaaaggtgcaggggttgctggcacagtcgtcaatgttcacttcgcagttcacacctaggggccaggaacatggcatggagtggccaccactgtgccccactagatgcaccattcccaaaccctctgtgcccctccaggtgtgctgtttctgccccagcccccggtcccacctgtggtcccagaagggcagcggcagaggtacttgtccaccaggtctaggcatttgccgccatggcggcagggctggctgcggcattcgtccacctggctctcgcagcgtgtgcccgtgtagccaggagcacaggcacatgagaagctggcgatgccatccacgcagcgaccatggtggcatgggtcaggggagcagtcgtccacgttgcgatcacacagcgtgccctcaaagcctgtggggccaagagggtcaggctccgcccacttgccaggggcctgcccacaagtgaggcctcggaccaatcctggttcagctctatctgaggccctgcccatcaagctgtcaggaggcgagctcaatacaggccccaccccccaccccccacttacttccactccaccccactacaagctccagaatttgtccctagccaagactctcccacagttaaatcccgcccccagctgtggccccacctccagccctgtttctgccccaccctccactggagatgggagcacatggcaggtgccaggggaaggtattgggccctccccattcagttacaggcaccctgtgcccagcccaacactttggctccacacgtagccttatgtcagtctatatgcattattggctccaccccccaactctgtcactgggtcctgccttgctacaaccccgcccccaagctctccccaagtctgttattggccctgtcgcccacaagccccgcctcctgattcttgtcggactgtcattggcccgcctcaccctcggcacagcggcactcgtagccatcgggctggtccacgcatttggcgccattcctgcagggcgtgctggcgcattcgtccacgtccagctgacacgtggagccgctgaagcctggggtggggagtgggatgagcagaggcccagaaagggtgagagcagtacacccctctccagccccgccttgtttgggtggaaaaacccatttacttggatttaaattaacttcaatgtttcataacatatggtttctattgtaagttatccgctaacgtggttttacaggttcccaccctggagtttttgccccttcccagacatgtcttttcgggctccctctcctgaggtcctcacccgaggggcaggtgcagctgaagccattgactcggtccttgcagaccccaccgttgacacaggggctactctgacactcgtcaatgtccacctcgcaataggttcctgtgaagcctggggcagggaatagggcttaggaaagcgggggctaccctatggtgtgaacggggtgcaaggaaggaggtacttcccttcctactcatcgacaaatcccccgagccttcgtccccacctctacactcccagcccaaccttaattttcagccacaggctggactgtcacccagccgtggtcccaactggcccaaggctcatgggtgtccgcagaggccttgccttcaaacccctcctcctctccccagtcctcagactaagccctttccccagtccccagcccccagccccagggccccccatagcctttgcccaggcttactgcaagcttgtctgcaggcttcaccttgacctcacagcagccccgactctgcctctctatccccaaccccttcccgagtgggtcctaaggccaagaatactcccagcccacctgaggttctactgactccatttgaccaagcccccagaatcacacagtattcccttctggtcctgaccccacctccttccaggcttcagtctctaagggtcccactccaaacccacttacaccccattctgctcagctccccatccgcgggcttctctgtccccgccccctgcctcaggacccgcccaggccacgcccaccacccacctgccatacagatacaggtgaactggcctatgcggtcgaggcacgtggcctggtttcggcagggccccgacagacactcgttgacatcggtctcacagcgaggtccagtgtagccacgaccgcactggcacaggaaggagccctgcgtgttcacgcacctgcccaagtgctcgcaggggttggcgcctgccggatggagtgcgatcggtgtgggcgtggctggccgggaccccctcctctcccctctttcccagcccattcacagacgatggagctcccctcaccgatagagcactcgtccacatcctggtcacatgccccacccgtgaagccgggaggacaggtgcaaatggcccggccgttcaccggatttgtgtcacagatagcatcctcgtggcaggggttgctgacacaggcgtcatccaggtgacacaggaggcctgggaagtggtaagcagaagtcataggcagatcttcctgctctgcccaaaaggcccacaccccttgagtattgttttgtcgttgttgttgttttgttttgttttttgagacgaagtttcgctcttgttgcccaagctggagtacaatagcgcgatcttggctcactgtaacctccacctcccaggttcaagcgattctcctgctcagcctcccgagtagctgggattacaggcatgtgccaccacgcccggctaattttttgtatttttagtagaaacggggtttcaccaagttagccaggttggtctcaaactcctgacctcaggtgatctgcctgcctcagcctcccaaagtgctgggattacaggcgtgagccaccgcgcccggcctgttgtttttattaaacctaaacagtatttagtagctgcttttttaatccatttattatgagaactatcaaacatacagaaaagttgaccattcatatacccaccacctagattcaactattgttagcttaatctaccaatcttcttttctaaaccatttaaaaataaattgcagaccgggcacagtggctcacgtctataatcctagcactttgggaggccaaggtgagtgcatcgcttgagttcaagagttcaagaccagcctgggcaatatagtgagacccgtctctacaaaaaatacaaagcttagccgggcatggtggcgcacgcctgtaatcccagctacttgggggactgaggtgggaggatcacttgagcccaggaagtcgaggctgcagtgagctgagatcatgccactgtactccagcctgggtgacaaagtgagactctgtctcaaaaataaaataaaataaattgcaaacatccacatattgttttaaaaccttttgactcttctgattacaaaagggtcctacactccagcctttgcttctgtaataccctctgccatgtatgccctctttctatatccacgttcccctcctaaacatgttctctgatctttgccacttccaaaggtaactcccaggagttccccattccaatggcttctgccctgagccatgcatcagtgcaatgtcagcctcctcccaagcctctcccaggcttacacttccccactaaagctgcctccagcatcatctttttttctctctcttttttgttatacacggtcttacactgtctcccaggctggaacgcagtggctcagtctcagctcactgcaacctccaccttctgggctcaagccatccttcaaccttagcatccagagtagctgggactacaggcatgcgctaccatgcccagctaattttttgtatttttggtagagatagggttttgccatgttgcccaggctggtctcaaactgctgagctcaagcaatctacccgcctgggcctcccaatgtgttggggttacaggcgtgagccaccacacccagcctaccaagtttttgtagagatgacaaaaactcactatgttgtccaggctggtctcaaagtcctgggcccaagcgatcctcccatcttggcctcccaaagtgctgggattacaggcatgagccactgtgcccggcctagcataatcttttttttattttttaaatttgagaaggagtctcactctgtcacccaggctagagtgcagtggtgcaatcttggctcactgcaatctccacctcctgggttcaagctactctcgtgccttagcctcctgagagacttggattacaggtgtgcaccaccacgcgcagctaatttttgtgtttttagtagagatggggtttcaccatattgaccaggctggtctcaaactcctgaccccagtgatccgcccgcctgggcctcccaaagtgctatgattacaggcatgagccactgtgcccagcctagcataatctttctaacactcaagtcagacttcttatttgccctcactaaaaaccatccatggctccctgcagagaaaacggccactcaccagtcttgcccatggggcaggcacagtagaaagaagccacgcggtcatggcaggtggccccatggaagcacacggctgtggcacagtcatcgatattctgactgcagctctcgcctgtccagccattgacacacacgcagctgtggccacccagcgtgttgaagcaggtacccccattgtggcaggcgttgggctgcagctgacactcatccacgtcctccgtgcagaactggcctgtggcacacagatgcagcagtccagccacctggcgcatgtccacccgaggcctgcctccccgctccctctggccgcagtgcccacctgtccactcaggagggcactggcagttataggtgttgacgccatccacgcatgtccccccattgagacatcggtgtcctggacagtcgtccacgttcacttcacaattctgaccctcaaaccctagcagggaagggggcaaggatggtcaccgccgggctggcctgctgtccccacgcccacccctctgactctcctgagtagggctcactcaccaggaagacaggcacagtcgtaagtgaggtcgccactctgcctgcaggtgcccccgttacggcatggtgagggtgcacagggcaccgcggggttctcacatagtggccctgtgtagccagctggacactggcagcggaaggagccaggtgtgttgaggcaggtgccaccatggcggcagggctcacccacccggcactcatccacgtcgcttcggcagctgcggccctggtagccaggtgggcaggagcagaggaagcgtccatcgggccccactgagcagcgggcaccgtgggcacaagggctgctgaggcagggatctggcagggagcagtcagggcctggagggaccaggacagggtgagtttaggactgaccacacccccgactacctcccctccagactcttcccctctcacctcggaagccacgggggcaccggcatgagaatcgggcggtgccagccaccactgaactctggcagacaccacggccagcacaggggcctgagtgacaggggtcctccagctgacaccgctcacccacccagccaggcgggcacctgtgggcagagatggcttggttgggcagcacagggcaggatggccccagacacaaagatacacacaagacaggcaagaaacacgcagggaaacagagcagcaaacacacatttgctgggagcagtggctcacgcctgtaatcccagaactttgggaggctgcggcgggcagatcacttggggtcaggagttcaagaccagcctagccaacatggtgtaaccccgtctctactaaaagtacgaaactttgctgggcatagtggtgcgtgcctgtagtcccagctactcaagaggctgaggcaggagaattgcttgaactcgggaggtggaggttgcagtgagccaagatcgcgccactgcactgcagcctgggtgacagagtaagactcggtctcaaagaaacaaaacaaaacaaaacacacattcattcatgcaacgaatatttactgagtacctactacgttctgagcaatacaaatacagcaacaaacacaatgaaaggggtccctatccctctggatccttgcagccaggtccaggcaaggagaacatatacgaataacaaattaatatacaacatgctggcagggggcggtgaaagccatcagaaccatgaaggatgtagtcagttgggtcacagcccctgaaaagatgacatccatgtcccagaacctgtgactaggaccttactttttttttaaatggctctttgcagatgtaattttttttttttaagagacggagtcttgctctgtcacccaggctgcagtgcagtggcgcgatcttggctcactgcaacctccacctcccggggttcaagcaattctttgtctcagcctcctgcgtagctgggagtacaggcacacgccaccaggcctggctatgcagatgtaattaaatgagagatgtcaagatgagattattctgaattatccacctgggccctaaattcagtgacaagtgttcatacaagagaacggctcacaactgtaatcccaacactttgggaggtcaagacaggataatcacttcaagccagaagttcaagatcagcttgagcaacatagggagactttttttccacaaaaaaaaattaaaaattataaccgggcatggtggcaggagcctgtaatcccagctactctggaggctgaggcaggagaatcgcttgaacccaggaggcggaggttgcagtgagccgaaattgcaccactgcactccagcctggttgacagagggagactccatctcaaaaaaaaacaaaaaacaaaaaaaacaaacaggccaggcgcagtggctcatgcctgtaatcccagcactctgggagactgaggtgggcggatcacgaggtcaggagttcaagaccagcctggccaatatggtgaaacctcgtcgctactaaaaatacaaaaattagctgggcgtggtggtgcactcgtgtagtccccgctactcaggaggctgagacagaagaattgcttgaacctgggaggcggaggttgcagtaagccgagatcgtgccactgcactccagcctgggtgacagagagagactccacctaaaaaataaaaataaaagattagctggccgtggtggctcacacctgtagtcccagcttcttgggaggctgaggtgggaggatcgcttcagcctgggagttgaaggctgcagtgaactaagattgcaccactgcactccagcctgggtgacagagcaagactctgtctcaaaaaaagagagaggcagccaaaaggagatttgggtgggagaaggaagagaagaagacagagacagggactggagtgagacagccactagctgagaaacgtctggagccaccagaagctgcaagagtcagttctcccctgggtccccatggagaggctcagccctgccgatatcttgatttcagacttccaacctccagaacttcaagagaataaattactattgttcaagctacccagtttatggtaatttgttagagcagccgtaggaagctaaaccacagggttaagggggatagaatgatggggtcaaggaggtggaattctattttcacagacatatgaaggtaaggagggggccatggggctttctggggaacggcattccaggcagagggaacagcaaatgaaaagtctcagacccatgtccaagcgcggtggctcacgcctgtaatcccaacactttgggagaccgaggcaggtagatcacctgacatcaagagttcgagaccagcctgaccaacatgaagaaactccgtctctactaaaaacacaaaaaatcagccaagtgtggtggcacatgcctgtaatcccagctactccggaggctgaggcaggaaaatcgcttgaacccaggagatagaggctgcagtgagccaagatcgagccactgcactccagcctgggcaacaagagcgatactcgatctcaaaaaaaaaaaaaaaaaggaaaaggaaaaaaagaagtctcagaccccaggacacaaccacgcaggcacacacagacaggcccagaaaccacagctacacacacagagggacacaccaattggacgccatggcctggccagcactcaagacaccaacccacagcatcccacgcggaaatgagcaactctcactcacagggacagacagcagggctcccacaaaccctcaagtcccttctctgggacttatatagcctcttatgcagggatgggagggtggagggttggggtactgacaccactgttggtaccctcatcttgggggggtggtccttcaacctgcagccccctccccaagcccaccaaggagtgtgaggaattggaactgggaggggttggtcttaagactggaaatctccaaggggcactagcggggtcagagggaggggcttagagaagccagagagtccaagctccgccccccgacgctgccaaccctcacccccctctatccccccaccctccgcccctggcgcggttgtcctccctccggcttgtcccagacgcctgagactgaactcaacaagcggctgactcagtccttagcgtcacccgcaagatcccccccaccccggcccccagcgaaacaggtcggggcacggccgagcaagcaagggtgcgggtggcgttgggaggggagggcacagctcccgtcccctcctccaaggcccgcagggcgaccactgcggccccgaccgcgcgtcgggagggggcgcgctgcgctgggcgccgaggatagctggtcccaccgccaggcagggcgcgacccgcgcgggccccctcccgacgccccgggcgggttcccacgctctgcgtcccgcgcccccgccgaccggtcgggccggttccagccccagcccgcgccccgccccacggcctaagctttgggggagacggaggggggagcgcagacctagttagggggggcacggcgggtgaggcgaggactaggagatggggacgaggtctatggaaacgtctgctgccggtgggggggtcttgggggatccatgggtggggtgacagcttgggggcatccttgaaaggacttgagtatttgagaccgtgaaagagactcgtggggggtggagggcgtgtagggagtggttcccacagcccaactcggaggactgagcccgctccactccgggcgatccgggctccgggcgccgcgcgcgccggtgattcacctgtcgaagggcggggcagccgcgggctcattcacctgtcggcagtattccaggcgcggagctccactgcgcaggcgcccggccccaccgctcgccctcccaggtgtgtggctccaggtaaggtcacacttttccccatcccgccccaccttcgcagaccccccagccccaggaaaccctctcagtcaggctcagccctccacaaaggtgagcccgagtgggagatccagccaaaataaatgtaggtgtaacttcaaagcggctcttcttggtctaaaatcaccccagacccacccagcttgggcctgacccagtacttggcacacatgatgctgaataaatgaatacattaatgagtcaatcaatggctactgcgtgaactgctgttattaatgatagcatgaaaggagccaagcatttcctcataaccttgagagacttctccttagagcacctgtttcctgcctccctaccattattatttataataatgcctatgttgagcacatactatattctgagcacttaatgtatgttgagtgcatacaggagttattattgccccattttccagatgcaaaaactgaggctcaaaaagcttgaatgctcaaggtgtcccagaccccagaatttaagctgagctctttctgtctctgctcagctccttcccagcctctgctctgctccctgcaacctcttgcctttccttgtgatatctaacaactaaattgttaagtcccttcacagtcgccagtgaagcattccctatttcacaggtgcaatgatgatcagagagggaaagtgactagcccaaagtcacactgcaagtaagtggcagtgtgggactgtattataggcctcctatgtccccctccactaaatgttgagagatgggaggggtgtggagggtgtgagccactgcgattggtccctgatagtttgttgattgaataat
